(19) United States
(12) Patent Application Publication
(10) Pub. No.: US 2014/0322716 A1
(43) Pub. Date: Oct. 30, 2014

(54) Uniquely Tagged Rearranged Adaptive Immune Receptor Genes in a Complex Gene Set

(71) Applicant: Adaptive Biotechnologies Corporation, Seattle, WA (US)

(72) Inventor: Harlan S. Robins, Seattle, WA (US)

(21) Appl. No.: 14/325,104

(22) Filed: Jul. 7, 2014

Related U.S. Application Data
(63) Continuation of application No. PCT/US2013/045994, filed on Jun. 14, 2013.
(60) Provisional application No. 61/789,408, filed on Mar. 15, 2013.
(60) Provisional application No. 61/660,665, filed on Jun. 15, 2012.

(51) Int. Cl. C12Q 1/68

(52) U.S. Cl. CPC C12Q 1/6876
USPC 435/6.12

(57) ABSTRACT

Compositions and methods are disclosed for uniquely tagging each rearranged gene segment that encodes a T cell receptor (TCR) and/or an immunoglobulin (Ig), in a DNA (or mRNA or cDNA reverse transcribed therefrom) sample from lymphoid cells. These and related embodiments permit accurate, high throughput quantification of distinct TCR and/or Ig encoding sequences. Also provided are compositions and methods for quantitatively sequencing the genes that encode both chains of a TCR or Ig heterodimer in a single cell, for example, to characterize the degree of T or B cell clonality in a sample.

### CROSS REFERENCE TO RELATED APPLICATIONS

[0001] This application is a continuation of International Application No. PCT/US2013045994, filed on Jun. 14, 2013, which claims the benefit of U.S. Provisional Application No. 61/660,665, filed on Jun. 15, 2012, and U.S. Provisional Application No. 61/789,408, filed on Mar. 15, 2013, which are herein incorporated in their entireties by reference.

### SEQUENCE LISTING

[0002] The instant application contains a Sequence Listing which has been submitted via EFS-Web and is hereby incorporated by reference in its entirety. Said ASCII copy, created on Jul. 1, 2014 is named 26170US_CRF_sequencelisting.txt, and is 4,382,702 bytes in size.

### BACKGROUND OF THE INVENTION

[0003] 1. Technical Field

[0004] The present disclosure relates generally to quantitative high-throughput sequencing of adaptive immune receptor encoding DNA or RNA (e.g., DNA or RNA encoding T cell receptors and immunoglobulins) in multiplexed nucleic acid amplification reactions. In particular, the compositions and methods described herein permit quantitative sequencing of DNA sequences encoding both chains of an adaptive immune receptor heterodimer in a single cell. Also disclosed herein are embodiments that overcome undesirable distortions in the quantification of adaptive immune receptor encoding sequences that can result from biased over-utilization and/or under-utilization of specific oligonucleotide primers in multiplexed DNA amplification.

[0005] 2. Description of the Related Art

[0006] The adaptive immune system employs several strategies to generate a repertoire of T- and B-cell antigen receptors, i.e., adaptive immune receptors, with sufficient diversity to recognize the universe of potential pathogens. The ability of T cells to recognize the universe of antigens associated with various cancers or infectious organisms is conferred by its T cell antigen receptor (TCR), which is a heterodimer of an α (alpha) chain from the TCRA locus and a β (beta) chain from the TCRB locus, or a heterodimer of a γ (gamma) chain from the TCRG locus and a δ (delta) chain from the TCRD locus. The proteins which make up these chains are encoded by DNA, which in lymphoid cells employs a unique rearrangement mechanism for generating the tremendous diversity of the TCR. This multi-subunit immune recognition receptor associates with the CD3 complex and binds to peptides presented by the major histocompatibility complex (MHC) class I and II proteins on the surface of antigen-presenting cells (APCs). Binding of TCR to the antigenic peptide on the APC is the central event in T cell activation, which occurs at an immunological synapse at the point of contact between the T cell and the APC.

[0007] Each TCR peptide contains variable complementarity determining regions (CDRs), as well as framework regions (FRs) and a constant region. The sequence diversity of αβ T cells is largely determined by the amino acid sequence of the third complementarity-determining region (CDR3) loops of the α and β chain variable domains, which diversity is a result of recombination between variable (V_{β}), diversity (D_{β}), and joining (J_{β}) gene segments in the β chain locus, and between analogous V_{α} and J_{α} gene segments in the α chain locus, respectively. The existence of multiple such gene segments in the TCR α and β chain loci allows for a large number of distinct CDR3 sequences to be encoded. CDR3 sequence diversity is further increased by independent addition and deletion of nucleotides at the V_{β}-D_{β}, D_{β}-J_{β}, and V_{α}-J_{α} junctions during the process of TCR gene rearrangement. In this respect, immunocompetence is reflected in the diversity of TCRs.

[0008] The γδ TCR is distinctive from the αβ TCR in that it encodes a receptor that interacts closely with the innate immune system, and recognizes antigen in a non-HLA-dependent manner. TCR γδ is expressed early in development, and has specialized anatomical distribution, unique pathogen and small-molecule specificities, and a broad spectrum of innate and adaptive cellular interactions. A biased pattern of TCRγ V and J segment expression is established early in ontogeny. Consequently, the diverse TCRγ repertoire in adult tissues is the result of extensive peripheral expansion following stimulation by environmental exposure to pathogens and toxic molecules.

[0009] Immunoglobulins (Igs or IG) expressed by B cells, also referred to herein as B cell receptors (BCR), are proteins consisting of four polypeptide chains, two heavy chains (H chains) from the IGH locus and two light chains (L chains) from either the IGK (kappa) or the IGL (lambda) locus, forming an H₂L₂ structure. Both H and L chains contain complementarity determining regions (CDR) involved in antigen recognition, and a constant domain. The H chains of IGs are initially expressed as membrane-bound isoforms using either the IgM or IgD constant region isoform, but after antigen recognition the H chain constant region can class switch to several additional isotypes, including IgG, IgE and IgA. As with TCR, the diversity of naïve Igs within an individual is mainly determined by the hypervariable complementarity determining regions (CDR). Similar to the TCR, the CDR3 domain of IGH chains is created by the combinatorial joining of the V_{H}, D_{H}, and J_{H} gene segments. Hypervariable domain sequence diversity is further increased by independent addition and deletion of nucleotides at the V_{H}-D_{H}, D_{H}-J_{H}, and V_{H}-J_{H} junctions during the process of Ig gene rearrangement. Distinct from TCR, Ig sequence diversity is further augmented by somatic hypermutation (SHM) throughout the rearranged IG gene after a naïve B cell initially recognizes an antigen. The process of SHM is not restricted to CDR3, and therefore can introduce changes in the germline sequence in framework regions, CDR1 and CDR2, as well as in the somatically rearranged CDR3.

[0010] As the adaptive immune system functions in part by clonal expansion of cells expressing unique TCRs or BCRs, accurately measuring the changes in total abundance of each clone is important to understanding the dynamics of an adaptive immune response. For instance, a healthy human has a few million unique TCRβ chains, each carried in hundreds to thousands of clonal T-cells out of the roughly trillion T cells in a healthy individual. Utilizing advances in high-throughput sequencing, a new field of molecular immunology has recently emerged to profile the vast TCR and BCR repertoires. Compositions and methods for the sequencing of rearranged adaptive immune receptor gene sequences and for adaptive immune receptor clonotype determination are described, for example, in Robins et al., 2009 Blood 114, 4099; Robins et al., 2010 Sci. Translat. Med. 2:47ra64; Robins et al., 2011 J. Immunol. Meth. doi:10.1016/j.jim.2011.09. 001; Sherwood et al. 2011 Sci. Translat. Med. 3:90ra61; U.S. Ser. No. 13/217,126 (US Pub. No. 2012/0058902), U.S. Ser. No. 12/794,507 (US Pub. No. 2010/0330571), WO/2010/151416, WO/2011/106738 (PCT/US2011/026373), WO2012/027503 (PCT/US2011/049012), U.S. Ser. No. 61/550,311, and U.S. Ser. No. 61/569,118, all herein incorporated by reference.

[0011] To date, several different strategies have been employed to sequence nucleic acids encoding adaptive immune receptors quantitatively at high throughput, and these strategies may be distinguished, for example, by the approach that is used to amplify the CDR3-encoding regions, and by the choice of sequencing genomic DNA (gDNA) or messenger RNA (mRNA).

[0012] Sequencing mRNA is a potentially easier method than sequencing gDNA, because mRNA splicing events remove the intron between J and C segments. This allows for the amplification of adaptive immune receptors (e.g., TCRs or Igs) having different V regions and J regions using a common 3′ polymerase chain reaction (PCR) amplification primer in the C region. For each TCRβ, for example, the thirteen J segments are all less than 60 base pairs (bp) long. Therefore, splicing events bring identical polynucleotide sequences encoding TCRβ constant regions (regardless of which V and J sequences are used) to within less than 100 bp of the rearranged VDJ junction. The spliced mRNA can then be reverse transcribed into complementary DNA (cDNA) using poly-dT primers complementary to the poly-A tail of the mRNA, random small primers (usually hexamers or nonamers) or C-segment-specific oligonucleotides. This reverse transcription should produce an unbiased library of TCR cDNA (because all cDNAs are primed with the same oligonucleotide, whether poly-dT, random hexamer, or C segment-specific oligo) that may then be sequenced to obtain information on the V and J segment used in each rearrangement, as well as the specific sequence of the CDR3. Such sequencing could use single, long reads spanning CDR3 (“long read”) technology, or could instead involve fractionating many copies of the longer sequences and using higher throughput shorter sequence reads.

[0013] Efforts to quantify the number of cells in a sample that express a particular rearranged TCR (or Ig) based on mRNA sequencing are difficult to interpret, however, because each cell potentially expresses different quantities of TCR mRNA. For example, T cells activated in vitro have 10-100 times as much mRNA per cell than quiescent T cells. To date, there is very limited information on the relative amount of TCR mRNA in T cells of different functional states, and therefore quantitation of mRNA in bulk does not necessarily accurately measure the number of cells carrying each clonal TCR.

[0014] Most T cells, on the other hand, have one productively rearranged TCRa and one productively rearranged TCRβ gene (or two rearranged TCRγ and TCRδ), and most B cells have one productively rearranged Ig heavy-chain gene and one productively rearranged Ig light-chain gene (either IGK or IGL) so quantification in a sample of genomic DNA encoding TCRs or BCRs should directly correlate with, respectively, the number of T or B cells in the sample. Genomic sequencing of polynucleotides encoding any one or more of the adaptive immune receptor chains, for instance, using the human TCRβ chain as a representative example, desirably entails amplifying with equal efficiency all of the many possible rearranged TCRβ encoding sequences that are present in a sample containing DNA from lymphoid cells of a subject, followed by quantitative sequencing, such that a quantitative measure of the relative abundance of each clonotype can be obtained.

[0015] Difficulties are encountered with such approaches, however, in that equal amplification and sequencing efficiencies may not be achieved readily, for example, for each rearranged TCRβ encoding clone, where each clone employs one of 54 possible germline V region-encoding genes and one of 13 possible J region-encoding genes. The specific sequences of the highly diverse V and J segments in the TCRβ genomic locus vary widely among the large number of possible rearrangements that result from using different V or J genes, due to diversity-generating mechanisms such as those summarized above.

[0016] This sequence diversity yields complex DNA samples in which accurate determination of the multiple distinct sequences contained therein is hindered by technical limitations on the ability to quantify a plurality of molecular species simultaneously using multiplexed amplification and high throughput sequencing. In addition, it is difficult from existing methodologies to sequence quantitatively DNA or RNA encoding both chains of a TCR or IG heterodimer in a manner that permits determination that both chains originated from the same lymphoid cell.

[0017] One or more factors can give rise to artifacts that skew sequencing data outputs, compromising the ability to obtain reliable quantitative data from sequencing strategies that are based on multiplexed amplification of a highly diverse collection of TCR or IG gene templates. These artifacts often result from unequal use of diverse primers during the multiplexed amplification step. Such biased utilization of one or more oligonucleotide primers in a multiplexed reaction that uses diverse amplification templates may arise as a function of one or more of differences in the nucleotide base composition of templates and/or oligonucleotide primers, differences in template and/or primer length, the particular polymerase that is used, the amplification reaction temperatures (e.g., annealing, elongation and/or denaturation temperatures), and/or other factors (e.g., Kanagawa, 2003 J. Biosci. Bioeng. 96:317; Day et al., 1996 Hum. Mol. Genet. 5:2039; Ogino et al., 2002 J. Mol. Diagnost. 4:185; Barnard et al., 1998 Biotechniques 25:684; Aird et al., 2011 Genome Biol. 12:R18).

[0018] Clearly there remains a need for improved compositions and methods that will permit accurate quantification of adaptive immune receptor-encoding DNA and RNA sequence diversity in complex samples, in a manner that avoids skewed results such as misleading over- or underrepresentation of individual sequences due to biases in the utilization of one or more oligonucleotide primers in an oligonucleotide primer set used for multiplexed amplification of a complex template DNA population, and in a manner that permits determination of the coding sequences for both chains of a TCR or IG heterodimer that originate from the same lymphoid cell. The presently described embodiments address this need and provide other related advantages.

### SUMMARY OF THE INVENTION

[0019] The invention provides compositions comprising an oligonucleotide amplification primer composition. The oligonucleotide amplification primer composition comprises (A)a first oligonucleotide amplification primer set comprising a plurality of forward oligonucleotide sequences of a general formula (A): U1-B1-V1 (A), and a plurality of reverse oligonucleotide sequences of a general formula (B): U2-B2-J1 (B), wherein U1 comprises an oligonucleotide sequence comprising a first universal adaptor oligonucleotide sequence, and U2 comprises an oligonucleotide sequence comprising a second universal adaptor oligonucleotide sequence. In one embodiment, B1 comprises an oligonucleotide that comprises either nothing or a first oligonucleotide barcode sequence of 6 to 20 contiguous nucleotides, and B2 comprises an oligonucleotide that comprises either nothing or a first oligonucleotide barcode sequence of 6 to 20 contiguous nucleotides, such that at least one of B1 or B2 is present. In another embodiment, V1 comprises an oligonucleotide sequence comprising at least 15 and not more than 100 contiguous nucleotides of a V region encoding gene sequence of a first adaptive immune receptor, or the complement thereof. In some embodiments, J1 comprises an oligonucleotide sequence comprising at least 15 and not more than 80 contiguous nucleotides of (i) a joining (J) region encoding gene sequence of said first adaptive immune receptor, or the complement thereof, or (ii) a constant (C) region encoding gene sequence of said first adaptive immune receptor, or the complement thereof, and in each of the plurality of oligonucleotide sequences of general formula U1-B1-V1, V1 comprises a unique oligonucleotide sequence, and in each of the plurality of oligonucleotide sequences of general formula U2-B2-J1, J1 comprises a unique oligonucleotide sequence. The oligonucleotide amplification primer composition comprises a second oligonucleotide amplification primer set comprising a plurality of forward oligonucleotide sequences of a general formula (C): U3-B3-V2 (C) and a plurality of reverse oligonucleotide sequences of a general formula (D): U4-B4-J2 (D), wherein U3 comprises an oligonucleotide sequence identical to either U1 or U2, and U4 comprises an oligonucleotide sequence identical to either U1 or U2, whichever sequence is not identical to U3. In some embodiments, B3 comprises an oligonucleotide sequence comprising an oligonucleotide barcode sequence of 6 to 20 contiguous nucleotides that is the same as B1, and B4 comprises an oligonucleotide sequence comprising an oligonucleotide barcode sequence of 6 to 20 contiguous nucleotides that is the same as B2. In another embodiment, V2 comprises an oligonucleotide sequence comprising at least 15 and not more than 100 contiguous nucleotides of a V region encoding gene sequence of a second adaptive immune receptor, or the complement thereof. In another embodiment, J2 comprises an oligonucleotide sequence comprising at least 15 and not more than 80 contiguous nucleotides of (i) a joining (J) region encoding gene sequence of said second adaptive immune receptor, or the complement thereof, or (ii) a constant (C) region encoding gene sequence of said second adaptive immune receptor, or the complement thereof, and in each of the plurality of oligonucleotide sequences of general formula U3-B3-V2, V2 comprises a unique oligonucleotide sequence, and in each of the plurality of oligonucleotide sequences of general formula U4-B4-J2, J2 comprises a unique oligonucleotide sequence. In one embodiment, U1 is the same as U3. In another embodiment, U2 is the same as U4.

[0020] The invention provides a method for labeling individual rearranged DNA sequences encoding a plurality of adaptive immune receptors in a biological sample that comprises lymphoid cells of a subject, the method comprising: (a) amplifying said rearranged DNA sequences using a first amplification primer set comprising an oligonucleotide primer composition described herein under conditions that promote amplification to obtain double-stranded DNA products. Each double-stranded DNA product comprises (i) a sequence comprising at least two universal adaptor oligonucleotide sequences with one at each end of the product, at least one oligonucleotide barcode sequence, an X1 oligonucleotide sequence, an X2 oligonucleotide sequence, and (ii) a complementary sequence to the sequence in (i); (b) amplifying the double-stranded DNA products of (a) with a second amplification primer set comprising a plurality of first and second sequencing platform tag-containing oligonucleotides that each comprise either: (i) a first sequencing platform tag-containing oligonucleotide comprising an oligonucleotide sequence that is capable of specifically hybridizing to the first universal adaptor oligonucleotide and a first sequencing platform-specific oligonucleotide sequence that is linked to and positioned 5′ to the first universal adaptor oligonucleotide sequence, or (ii) a second sequencing platform tag-containing oligonucleotide comprising an oligonucleotide sequence that is capable of specifically hybridizing to the second universal adaptor oligonucleotide sequence and a second sequencing platform-specific oligonucleotide sequence that is linked to and positioned 5′ to the second universal adaptor oligonucleotide sequence. In some embodiments, amplifying takes place under conditions that promote amplification of both strands of the separated double-stranded DNA product of (a), to obtain a library of rearranged DNA sequences encoding a plurality of adaptive immune receptors for sequencing. The method also comprises a step (c) for sequencing the DNA library obtained in (b), wherein each of the sequences in the DNA library comprises a unique oligonucleotide barcode sequence, thereby labeling each sequence with an unique identifiable barcode sequence.

[0021] In some embodiments, a plurality of oligonucleotides in the second amplification primer set each further comprises either or both of: (i) a sample-identifying barcode oligonucleotide which comprises a third barcode oligonucleotide B5 comprising an oligonucleotide barcode sequence of 6 to 20 contiguous nucleotides having a sequence that is distinct from B1 and B2, wherein in the first sequencing platform tag-containing oligonucleotide B5 is situated between the first universal adaptor oligonucleotide and the first sequencing platform-specific oligonucleotide sequence, and wherein in the second sequencing platform tag-containing oligonucleotide B3 is situated between the second universal adaptor oligonucleotide and the second sequencing platform-specific oligonucleotide sequence; and (ii) a spacer oligonucleotide of any sequence of 1 to 20 contiguous nucleotides, wherein said spacer oligonucleotide is situated between the first universal adaptor oligonucleotide and the first sequencing platform-specific oligonucleotide sequence in the first sequencing platform tag-containing oligonucleotide, and between the second universal adaptor oligonucleotide and the second sequencing platform-specific oligonucleotide sequence in the second sequencing platform tag-containing oligonucleotide.

[0022] In other embodiments, the invention provides an oligonucleotide primer composition, comprising a plurality of oligonucleotides sequences having a general formula (I): 5′-U1-B1ₙ-X-3′ (I) wherein: U1 comprises an oligonucleotide sequence which comprises a first universal adaptor oligonucleotide sequence, B1 comprises an oligonucleotide sequence that comprises a first oligonucleotide barcode sequence of n contiguous nucleotides, wherein n is at least 6 nucleotides, and X comprises either (i) an oligonucleotide sequence comprising at least 15 and not more than 80 contiguous nucleotides of an adaptive immune receptor variable (V) region encoding gene sequence, or the complement thereof, or (ii) an oligonucleotide comprising at least 15 and not more than 80 contiguous nucleotides of an adaptive immune receptor joining (J) region encoding gene sequence, or the complement thereof, and in each of the plurality of oligonucleotide sequences, X comprises a unique oligonucleotide sequence.

[0023] In some embodiments, the plurality of oligonucleotide sequences comprises up to 4ⁿ unique B1 oligonucleotide sequences. In one embodiment, n is 7, 8, 9, 10, 11, 12, 13, 14, 15, 16, 17, 18, 19 or 20 contiguous nucleotides. In other embodiments, X comprises an oligonucleotide sequence comprising at least 20, 30, 40 or 50 contiguous nucleotides of said adaptive immune receptor V region encoding gene sequence, or said complement thereof. In another embodiment, X comprises an oligonucleotide sequence comprising not more than 70, 60, or 55 contiguous nucleotides of said adaptive immune receptor V region encoding gene sequence, or said complement thereof. In yet another embodiment, X comprises an oligonucleotide sequence comprising at least 16-50 contiguous nucleotides of said adaptive immune receptor J region encoding gene sequence, or said complement thereof. In other embodiments, X comprises an oligonucleotide sequence comprising not more than 70, 60 or 55 contiguous nucleotides of said adaptive immune receptor J region encoding gene sequence, or said complement thereof. In one embodiment, X is capable of hybridizing to a V region encoding gene sequence. In another embodiment, X is capable of hybridizing to a J region encoding gene sequence.

[0024] In other embodiments, B1 is a unique tag for identifying individual rearranged TCR or Ig encoding sequences. In another embodiment, U1 comprises SEQ ID NOs: 1710-1731. B1 can include sequences listed in Table 8. X can comprise SEQ ID NOs: 1631-1643 or 1696-1708. In some embodiments, X comprises SEQ ID NOs: 1644-1695. In other embodiments, X comprises SEQ ID NOs: 5613-5625. In some embodiments, the oligonucleotide composition comprising said plurality of oligonucleotide sequences comprising SEQ ID NOs: 5626-5685. In other embodiments, the oligonucleotide composition comprising said plurality of oligonucleotide sequences comprises SEQ ID NOs:1-1630.

[0025] In some embodiments, the composition includes a second plurality of oligonucleotide sequences comprising a general formula (II): 5′-P1-S1-B2-U1-3′ (II), wherein P1 comprises a sequencing platform-specific oligonucleotide, 51 comprises a sequencing platform tag-containing oligonucleotide sequence, wherein B2 comprises an oligonucleotide barcode sequence and wherein said oligonucleotide barcode sequence can be used to identify a sample source, and wherein U1 comprises said first universal adaptor oligonucleotide sequence. In other embodiments, the second plurality of oligonucleotide sequences comprises SEQ ID NOs: 5686-5877.

[0026] In another embodiment, the invention includes an oligonucleotide primer composition for a first amplification primer set comprising: (A) a plurality of first oligonucleotide sequences of a general formula (III): 5′-U1-B1ₙ-X1-3′ (III). In some embodiments, U1 comprises an oligonucleotide sequence comprising a first universal adaptor oligonucleotide sequence, (ii) B1 comprises an oligonucleotide sequence comprising a first oligonucleotide barcode sequence of n contiguous nucleotides, wherein n is 0 or 6 to 20, and (iii) X1 comprises either (a) an oligonucleotide sequence comprising at least 15 and not more than 80 contiguous nucleotides of an adaptive immune receptor variable (V) region encoding gene sequence, or the complement thereof, or (b) an oligonucleotide sequence comprising at least 15 and not more than 80 contiguous nucleotides of an adaptive immune receptor joining (J) region encoding gene sequence, or the complement thereof, and in each of the plurality of oligonucleotide sequences X1 comprises a unique oligonucleotide sequence.

[0027] In one embodiment, the plurality of oligonucleotide sequences comprises up to 4ⁿ unique B1 oligonucleotide sequences,

[0028] In another embodiment, the first amplification primer set also comprises: (B) a plurality of second oligonucleotide sequences of a general formula (IV): 5′-U2-B2ₘ-X2-3′ (IV), wherein: (i) U2 comprises an oligonucleotide sequence comprising a second universal adaptor oligonucleotide sequence, (ii) B2 comprises an oligonucleotide sequence comprising a second oligonucleotide barcode sequence of m contiguous nucleotides, wherein m is 0 or 6 to 20, (iii) X2 comprises (a) an oligonucleotide sequence comprising at least 15 and not more than 80 contiguous nucleotides of an adaptive immune receptor variable (V) region encoding gene sequence, or the complement thereof, or (b) an oligonucleotide sequence comprising at least 15 and not more than 80 contiguous nucleotides of an adaptive immune receptor joining (J) region encoding gene sequence, or the complement thereof, and in each of the plurality of oligonucleotide sequences X1 comprises a unique oligonucleotide sequence, wherein n and m are independent of each other, and in said first and second pluralities of oligonucleotides, m and n are not both zero, and wherein if X1 comprises an oligonucleotide sequence comprising an adaptive immune receptor V region encoding gene sequence, then X2 comprises an oligonucleotide sequence comprising an adaptive immune receptor J region encoding gene sequence, and if X1 comprises an oligonucleotide sequence comprising an adaptive immune receptor J region encoding gene sequence, then X2 comprises an oligonucleotide sequence comprising an adaptive immune receptor V region encoding gene sequence.

[0029] In one embodiment, the plurality of oligonucleotide sequences comprises up to 4′ unique B2 oligonucleotide sequences.

[0030] In another embodiment, X1 or X2 comprises an oligonucleotide sequence comprising at least 20, 30, 40 or 50 contiguous nucleotides of said adaptive immune receptor V region encoding gene sequence, or said complement thereof. In yet another embodiment, X1 or X2 comprises an oligonucleotide sequence comprising not more than 70, 60 or 55 contiguous nucleotides of said adaptive immune receptor V region encoding gene sequence, or said complement thereof. In other embodiments, X1 or X2 comprises an oligonucleotide sequence comprising at least 16-50 contiguous nucleotides of said adaptive immune receptor J region encoding gene sequence, or said complement thereof. In one embodiment, X1 or X2 comprises an oligonucleotide sequence comprising not more than 70, 60 or 55 contiguous nucleotides of said adaptive immune receptor J region encoding gene sequence, or said complement thereof. In another embodiment, B1 is a unique tag for identifying an individual rearranged TCR or Ig encoding sequence. In yet another embodiment, B2 is a unique tag for identifying an individual rearranged TCR or Ig encoding sequence.

[0031] In some embodiments, U1 or U2 comprises SEQ ID NOs: 1710-1731. In one embodiment, B1 or B2 comprises sequences listed in Table 8. In another embodiment, X1 or X2 comprises SEQ ID NOs: 1631-1643 or 1696-1708. In yet another embodiment, X1 or X2 comprises SEQ ID NOs: 1644-1695. X1 or X2 can comprise SEQ ID NOs: 5613-5625. In other embodiments, the plurality of first or second oligonucleotide sequences comprises SEQ ID NOs: 5626-5685. In another embodiment, the plurality of first or second oligonucleotide sequences comprise SEQ ID NOs:1-1630.

[0032] In another embodiment, the invention comprises an oligonucleotide amplification primer composition, comprising: (A) a first oligonucleotide amplification primer set comprising a plurality of oligonucleotide sequences of a general formula (V): U1/2-B1-X1 (V), wherein U1/2 comprises an oligonucleotide sequence comprising a first universal adaptor oligonucleotide sequence when B1 is present, or a second universal adaptor oligonucleotide sequence when B1 is nothing, and wherein B1 comprises an oligonucleotide that comprises either nothing or a first oligonucleotide barcode sequence of 6 to 20 contiguous nucleotides, and wherein X1 comprises either: (1) an oligonucleotide sequence comprising at least 15 and not more than 80 contiguous nucleotides of an adaptive immune receptor V region encoding gene sequence, or the complement thereof, or (2) an oligonucleotide sequence comprising at least 15 and not more than 80 contiguous nucleotides of (i) an adaptive immune receptor joining (J) region encoding gene sequence, or the complement thereof, or (ii) an adaptive immune receptor constant (C) region encoding gene sequence, or the complement thereof, and in each of the plurality of oligonucleotide sequences of general formula U1/2-B1-X1, X1 comprises a unique oligonucleotide sequence.

[0033] In some embodiments, the oligonucleotide amplification primer composition also comprises: (B) a second oligonucleotide amplification primer set comprising a plurality of oligonucleotide sequences of a general formula (VI): U3/4-B2-X2 (VI), wherein U3/4 comprises an oligonucleotide sequence comprising a third universal adaptor oligonucleotide sequence when B2 is present or a fourth universal adaptor oligonucleotide sequence when B2 is nothing, and wherein B2 comprises an oligonucleotide sequence comprising either nothing or a second oligonucleotide barcode sequence of 6 to 20 contiguous nucleotides that is the same as B1, and wherein X2 comprises either (1) an oligonucleotide sequence comprising at least 15 and not more than 80 contiguous nucleotides of an adaptive immune receptor V region encoding gene sequence, or the complement thereof, or (2) an oligonucleotide sequence comprising at least 15 and not more than 80 contiguous nucleotides of an adaptive immune receptor joining (J) region encoding gene sequence, or the complement thereof, and in each of the plurality of oligonucleotide sequences of general formula U3/4-B2-X2, X2 comprises a unique oligonucleotide sequence. In some embodiments, U3 has the same sequence as U1 or U2. In other embodiments, U4 has the same sequence as U1 or U2.

[0034] Certain embodiments of the invention include a method for identifying individual rearranged DNA sequences encoding a plurality of adaptive immune receptors in a biological sample that comprises lymphoid cells of a subject, the method comprising: (a) amplifying said rearranged DNA sequences using a first amplification primer set comprising an oligonucleotide primer composition described herein under conditions that promote amplification to obtain double-stranded DNA products that each comprise (i) a sequence comprising at least one universal adaptor oligonucleotide sequence, at least one oligonucleotide barcode sequence, and at least one of an X, X1 or X2 oligonucleotide sequence, and (ii) a complementary sequence to the sequence in (i).

[0035] The method includes the step of (b) amplifying the double-stranded DNA products of (a) with a second amplification primer set comprising a plurality of first and second sequencing platform tag-containing oligonucleotides that each comprise either: (i) a first sequencing platform tag-containing oligonucleotide comprising an oligonucleotide sequence that is capable of specifically hybridizing to the first universal adaptor oligonucleotide and a first sequencing platform-specific oligonucleotide sequence that is linked to and positioned 5′ to the first universal adaptor oligonucleotide sequence, or (ii) a second sequencing platform tag-containing oligonucleotide comprising an oligonucleotide sequence that is capable of specifically hybridizing to the second universal adaptor oligonucleotide sequence and a second sequencing platform-specific oligonucleotide sequence that is linked to and positioned 5′ to the second universal adaptor oligonucleotide sequence, wherein amplifying takes place under conditions that promote amplification of both strands of the separated double-stranded DNA product of (a), to obtain a library of rearranged DNA sequences encoding a plurality of adaptive immune receptors for sequencing.

[0036] The method includes the step of (c) sequencing the DNA library obtained in (b), wherein each of the sequences in the DNA library comprises a unique oligonucleotide barcode sequence, thereby labeling each sequence with a unique identifiable barcode sequence. In some embodiments, a plurality of oligonucleotides in the second amplification primer set each further comprises either or both of: (i) a sample-identifying barcode oligonucleotide which comprises a third barcode oligonucleotide B3 comprising an oligonucleotide barcode sequence of 6 to 20 contiguous nucleotides having a sequence that is distinct from B1 and B2, wherein in the first sequencing platform tag-containing oligonucleotide B3 is situated between the first universal adaptor oligonucleotide and the first sequencing platform-specific oligonucleotide sequence, and wherein in the second sequencing platform tag-containing oligonucleotide B3 is situated between the second universal adaptor oligonucleotide and the second sequencing platform-specific oligonucleotide sequence, and (ii) a spacer oligonucleotide of any sequence of 1 to 20 contiguous nucleotides, wherein said spacer oligonucleotide is situated between the first universal adaptor oligonucleotide and the first sequencing platform-specific oligonucleotide sequence in the first sequencing platform tag-containing oligonucleotide, and between the second universal adaptor oligonucleotide and the second sequencing platform-specific oligonucleotide sequence in the second sequencing platform tag-containing oligonucleotide.

[0037] In some embodiments, the invention includes a method for labeling individual rearranged DNA sequences or mRNA sequences transcribed therefrom encoding first and second polypeptide sequences of an adaptive immune receptor heterodimer in a single lymphoid cell, comprising: contacting (A) a first plurality of individual microdroplets that each contain a single lymphoid cell or genomic DNA isolated therefrom or complementary DNA (cDNA) that has been reverse transcribed from messenger RNA (mRNA) of a single lymphoid cell, with (B) a second plurality of individual microdroplets. The second plurality of individual microdroplets each contain: (i) a first oligonucleotide amplification primer set that is capable of amplifying a rearranged DNA sequence encoding a first polypeptide of an adaptive immune receptor heterodimer, and (ii) a second oligonucleotide amplification primer set that is capable of amplifying a rearranged DNA sequence encoding a second polypeptide of the adaptive immune receptor heterodimer. In some embodiments, the first oligonucleotide amplification primer set comprises a composition of U1/2-B1-X1 described herein, and the second oligonucleotide amplification primer set comprises a composition of U3/4-B2-X2 described herein.

[0038] The method also includes providing conditions for a time sufficient such that a plurality of fusion events occur between one of said first microdroplets and one of said second microdroplets to produce a plurality of fused microdroplets, and providing conditions that permit amplification of the genomic DNA, or the cDNA that has been reverse transcribed from mRNA, using the first and second oligonucleotide amplification primer sets within the plurality of fused microdroplets. In some embodiments, each of one or more of said plurality of fused microdroplets comprises: a first double-stranded DNA product that comprises at least one first universal adaptor oligonucleotide sequence, at least one first oligonucleotide barcode sequence, at least one X1 oligonucleotide V region encoding gene sequence of said first polypeptide of the adaptive immune receptor heterodimer, at least one second universal adaptor oligonucleotide sequence, and at least one X1 oligonucleotide J region or C region encoding gene sequence of said first polypeptide of the adaptive immune receptor heterodimer, and a second double-stranded DNA product that comprises at least one third universal adaptor oligonucleotide sequence, at least one second oligonucleotide barcode sequence, at least one X2 oligonucleotide V region encoding gene sequence of said second polypeptide of the adaptive immune receptor heterodimer, at least one fourth universal adaptor oligonucleotide sequence, and at least one X2 oligonucleotide J region or C region encoding gene sequence of said second polypeptide of the adaptive immune receptor heterodimer, thereby upon amplification of the genomic DNA, or the cDNA that has been reverse transcribed from mRNA, labeling each of the individual rearranged DNA sequences or mRNA sequences transcribed therefrom with an oligonucleotide barcode sequence.

[0039] In some embodiments, the method comprises disrupting the plurality of fused microdroplets to obtain a heterogeneous mixture of said first and second double-stranded DNA products. The method also includes contacting the mixture of the first and second double-stranded DNA products with a third amplification primer set and a fourth amplification primer set, wherein the third amplification primer set comprises (i) a plurality of first sequencing platform tag-containing oligonucleotides that each comprise an oligonucleotide sequence that is capable of specifically hybridizing to the first universal adaptor oligonucleotide and a first sequencing platform-specific oligonucleotide sequence that is linked to and positioned 5′ to the first universal adaptor oligonucleotide sequence, and (ii) a plurality of second sequencing platform tag-containing oligonucleotides that each comprise an oligonucleotide sequence that is capable of specifically hybridizing to the second universal adaptor oligonucleotide sequence and a second sequencing platform-specific oligonucleotide sequence that is linked to and positioned 5′ to the second universal adaptor oligonucleotide sequence. In some embodiments, the fourth amplification primer set comprises (i) a plurality of third sequencing platform tag-containing oligonucleotides that each comprise an oligonucleotide sequence that is capable of specifically hybridizing to the third universal adaptor oligonucleotide and a third sequencing platform-specific oligonucleotide sequence that is linked to and positioned 5′ to the third universal adaptor oligonucleotide sequence, and (ii) a plurality of fourth sequencing platform tag-containing oligonucleotides that each comprise an oligonucleotide sequence that is capable of specifically hybridizing to the fourth universal adaptor oligonucleotide sequence and a fourth sequencing platform-specific oligonucleotide sequence that is linked to and positioned 5′ to the fourth universal adaptor oligonucleotide sequence. In one embodiment, the step of contacting takes place under conditions and for a time sufficient to amplify both strands of the first and second double-stranded DNA products, to obtain a DNA library for sequencing.

[0040] In another embodiment, the method includes sequencing the DNA library to obtain a data set of sequences encoding the first and second polypeptide sequences of the adaptive immune receptor heterodimer. In some embodiments, the third and fourth amplification primer sets are the same.

[0041] In one embodiment, the invention comprises a method for labeling individual rearranged DNA sequences encoding first and second polypeptide sequences of an adaptive immune receptor heterodimer in a single lymphoid cell, comprising: contacting (A) a first plurality of individual microdroplets that each contain complementary DNA (cDNA) that has been reverse transcribed from messenger RNA (mRNA) of a single lymphoid cell, with (B) a second plurality of individual microdroplets. The second plurality of individual microdroplets each contain (i) a first oligonucleotide amplification primer set that is capable of amplifying a first cDNA sequence encoding a first polypeptide of an adaptive immune receptor heterodimer, and (ii) a second oligonucleotide amplification primer set that is capable of amplifying a second cDNA sequence encoding a second polypeptide of the adaptive immune receptor heterodimer. The first oligonucleotide amplification primer set comprises a composition of U1/2-B1-X1 described herein, and the second oligonucleotide amplification primer set comprises a composition of U3/4-B2-X2 described herein.

[0042] In other embodiments, the method includes providing conditions for a time sufficient for a plurality of fusion events between one of said first microdroplets and one of said second microdroplets to produce a plurality of fused microdroplets and conditions that permit amplification of the cDNA that has been reverse transcribed from mRNA of a single lymphoid cell, using the first and second oligonucleotide amplification primer sets within the plurality of fused microdroplets. In some embodiments, each of one or more of said plurality of fused microdroplets comprises: a first double-stranded DNA product that comprises at least one first universal adaptor oligonucleotide sequence, at least one first oligonucleotide barcode sequence, at least one X1 oligonucleotide V region encoding gene sequence of said first polypeptide of the adaptive immune receptor heterodimer, at least one second universal adaptor oligonucleotide sequence, and at least one X1 oligonucleotide J region or C region encoding gene sequence of said first polypeptide of the adaptive immune receptor heterodimer, and a second double-stranded DNA product that comprises at least one third universal adaptor oligonucleotide sequence, at least one second oligonucleotide barcode sequence, at least one X2 oligonucleotide V region encoding gene sequence of said second polypeptide of the adaptive immune receptor heterodimer, at least one fourth universal adaptor oligonucleotide sequence, and at least one X2 oligonucleotide J region or C region encoding gene sequence of said second polypeptide of the adaptive immune receptor heterodimer, thereby upon amplification of the cDNA, uniquely labeling each of the individual rearranged cDNA sequences with a unique oligonucleotide barcode sequence.

[0043] In another embodiment, the method includes disrupting the plurality of fused microdroplets to obtain a heterogeneous mixture of said first and second double-stranded DNA products. In other embodiments, the method includes contacting the mixture of first and second double-stranded DNA products with a third amplification primer set and a fourth amplification primer set. In one embodiment, the third amplification primer set comprises (i) a plurality of first sequencing platform tag-containing oligonucleotides that each comprise an oligonucleotide sequence that is capable of specifically hybridizing to the first universal adaptor oligonucleotide and a first sequencing platform-specific oligonucleotide sequence that is linked to and positioned 5′ to the first universal adaptor oligonucleotide sequence, and (ii) a plurality of second sequencing platform tag-containing oligonucleotides that each comprise an oligonucleotide sequence that is capable of specifically hybridizing to the second universal adaptor oligonucleotide sequence and a second sequencing platform-specific oligonucleotide sequence that is linked to and positioned 5′ to the second universal adaptor oligonucleotide sequence. In one embodiment, the fourth amplification primer set comprises (i) a plurality of third sequencing platform tag-containing oligonucleotides that each comprise an oligonucleotide sequence that is capable of specifically hybridizing to the third universal adaptor oligonucleotide and a third sequencing platform-specific oligonucleotide sequence that is linked to and positioned 5′ to the third universal adaptor oligonucleotide sequence, and (ii) a plurality of fourth sequencing platform tag-containing oligonucleotides that each comprise an oligonucleotide sequence that is capable of specifically hybridizing to the fourth universal adaptor oligonucleotide sequence and a fourth sequencing platform-specific oligonucleotide sequence that is linked to and positioned 5′ to the fourth universal adaptor oligonucleotide sequence. In some embodiments, the step of contacting takes place under conditions and for a time sufficient to amplify both strands of the first and second double-stranded DNA products, to obtain a DNA library for sequencing.

[0044] In certain embodiments, the method includes sequencing the DNA library to obtain a data set of sequences encoding the first and second polypeptide sequences of the adaptive immune receptor heterodimer. In another embodiment, the third amplification primer set is identical to the fourth amplification primer set.

[0045] In certain other embodiments, the method includes either or both of: (1) the first oligonucleotide amplification primer set is capable of amplifying, in the rearranged DNA sequence encoding the first polypeptide, a rearranged DNA sequence encoding a first complementarity determining region-3 (CDR3) of the first polypeptide; and (2) the second oligonucleotide amplification primer set is capable of amplifying, in the rearranged DNA sequence encoding the second polypeptide, a rearranged DNA sequence encoding a second complementarity determining region-3 (CDR3) of the second polypeptide.

[0046] In some embodiments, the first polypeptide of the adaptive immune receptor heterodimer is a TCR alpha (TCRA) chain and the second polypeptide of the adaptive immune receptor heterodimer is a TCR beta (TCRB) chain. In other embodiments, the first polypeptide of the adaptive immune receptor heterodimer is a TCR gamma (TCRG) chain and the second polypeptide of the adaptive immune receptor heterodimer is a TCR delta (TCRD) chain.

[0047] In another embodiment, the first polypeptide of the adaptive immune receptor heterodimer is an immunoglobulin heavy (IGH) chain and the second polypeptide of the adaptive immune receptor heterodimer is an immunoglobulin light (IGL or IGK or both IGL and IGK) chain. In some embodiments, if the first polypeptide of the adaptive immune receptor heterodimer is an IGH chain and the second polypeptide of the adaptive immune receptor heterodimer is both IGL and IGK, then three different amplification primer sets are used comprising: a first oligonucleotide amplification primer set for IGH, a second oligonucleotide amplification primer set for IGK, and a third oligonucleotide amplification primer set for IGL.

[0048] In yet another embodiment, each of the second plurality of individual microdroplets further contains a third oligonucleotide primer set that is capable of amplifying a third cDNA sequence that encodes a lymphocyte status indicator molecule and that comprises a composition comprising a plurality of oligonucleotide sequences having a general formula (VII): U5/6-B-X3 (VII). In one aspect, U5/6 comprises a fifth universal adaptor oligonucleotide sequence when B is present or a sixth universal adaptor oligonucleotide sequence when B is nothing. In another aspect, B comprises B1 or B2. In yet another aspect, X3 comprises an oligonucleotide that is one of (i) a forward primer of 15-80 contiguous nucleotides of a lymphocyte status indicator molecule encoding gene sequence, or the complement thereof, and (ii) a reverse primer of 15-80 contiguous nucleotides of a lymphocyte status indicator molecule encoding gene sequence, or the complement thereof, and in each of the plurality of oligonucleotide sequences of general formula U5/6-B-X3, X3 comprises a unique oligonucleotide sequence.

[0049] In one embodiment, the lymphocyte status indicator molecule comprises one or more of FoxP3, CD4, CD8, CD11a, CD18, CD21, CD25, CD29, CCD30, CD38, CD44, CD45, CD45RA, CD45RO, CD49d, CD62, CD62L, CD69, CD71, CD103, CD137 (4-1BB), CD138, CD161, CD294, CCR5, CXCR4, IgA H-chain constant region, IgA H-chain constant region, IgE H-chain constant region, IgD H-chain constant region, IgM H-chain constant region, HLA-DR, IL-2, IL-5, IL-6, IL-9, IL-10, IL-12, IL-13, IL-15, IL-21, TGF-β, TLR1, TLR2, TLR3, TLR4, TLR5, TLR6, TLR7, TLR8, TLR9 and TLR10.

[0050] In some embodiments, the method includes sorting the data set of sequences according to oligonucleotide barcode sequences identified therein to obtain a plurality of barcode sequence sets each having a unique barcode, sorting each barcode sequence set of (a) into an X1 sequence-containing subset and an X2 sequence-containing subset, and clustering members of each of the X1 and X2 sequence-containing subsets according to X1 and X2 sequences to obtain one or a plurality of X1 sequence cluster sets and one or a plurality of X2 sequence cluster sets, respectively, and error-correcting single nucleotide barcode sequence mismatches within any one or more of said X1 and X2 sequence cluster sets. The method further includes identifying as originating from the same cell sequences that are members of an X1 and an X2 sequence cluster set that belong to the same one or more barcode sequence sets.

[0051] In another embodiment, methods of the invention include determining rearranged DNA sequences encoding first and second polypeptide sequences of an adaptive immune receptor heterodimer in a single lymphoid cell, comprising: (1) distributing cells of a cell suspension that comprises a population of lymphoid cells of a subject, amongst a plurality of containers that are capable of containing said cells, to obtain a plurality of containers that each contain a subpopulation of the lymphoid cells that comprises one lymphoid cell or a plurality of lymphoid cells. The method also includes (2) contacting each of said plurality of containers, under conditions and for a time sufficient to promote reverse transcription of messenger RNA (mRNA) in the lymphoid cells in the plurality of containers, with a first and a second oligonucleotide reverse transcription primer set, wherein (A) the first oligonucleotide reverse transcription primer set is capable of reverse transcribing a plurality of first mRNA sequences encoding a plurality of polypeptides of a first adaptive immune receptor heterodimer, and (B) the second oligonucleotide reverse transcription primer set is capable of reverse transcribing a plurality of second mRNA sequences encoding a plurality of polypeptides of a second adaptive immune receptor heterodimer.

[0052] In another embodiment, the method comprises (I) the first oligonucleotide reverse transcription primer set comprising a composition of a general formula of U1/2-B1-X1 described herein, and (II) the second oligonucleotide reverse transcription primer set comprises a composition comprising a general formula U3/4-B2-X2 described herein.

[0053] In yet another embodiment, the step of contacting takes place under conditions and for a time sufficient to obtain in each of one or more of said plurality of containers: a first reverse-transcribed complementary DNA (cDNA) product that comprises at least one first universal adaptor oligonucleotide sequence, at least one first oligonucleotide barcode sequence, at least one X1 oligonucleotide V region encoding gene sequence of said first polypeptide of the adaptive immune receptor heterodimer, at least one second universal adaptor oligonucleotide sequence, and at least one X1 oligonucleotide J region or C region encoding gene sequence of said first polypeptide of the adaptive immune receptor heterodimer, and a second reverse-transcribed cDNA product that comprises at least one third universal adaptor oligonucleotide sequence, at least one second oligonucleotide barcode sequence, at least one X2 oligonucleotide V region encoding gene sequence of said second polypeptide of the adaptive immune receptor heterodimer, at least one fourth universal adaptor oligonucleotide sequence, and at least one X2 oligonucleotide J region or C region encoding gene sequence of said second polypeptide of the adaptive immune receptor heterodimer.

[0054] In one embodiment, the method includes combining the first and second reverse-transcribed cDNA products from the plurality of containers to obtain a mixture of reverse-transcribed cDNA products and contacting the mixture of first and second reverse-transcribed cDNA products of (3) with a first oligonucleotide amplification primer set and a second oligonucleotide amplification primer set. In some embodiments, the first amplification primer set comprises (i) a plurality of first sequencing platform tag-containing oligonucleotides that each comprise an oligonucleotide sequence that is capable of specifically hybridizing to the first universal adaptor oligonucleotide and a first sequencing platform-specific oligonucleotide sequence that is linked to and positioned 5′ to the first universal adaptor oligonucleotide sequence, and (ii) a plurality of second sequencing platform tag-containing oligonucleotides that each comprise an oligonucleotide sequence that is capable of specifically hybridizing to the second universal adaptor oligonucleotide sequence and a second sequencing platform-specific oligonucleotide sequence that is linked to and positioned 5′ to the second universal adaptor oligonucleotide sequence.

[0055] In another embodiment, the second oligonucleotide amplification primer set comprises (i) a plurality of third sequencing platform tag-containing oligonucleotides that each comprise an oligonucleotide sequence that is capable of specifically hybridizing to the third universal adaptor oligonucleotide and a third sequencing platform-specific oligonucleotide sequence that is linked to and positioned 5′ to the third universal adaptor oligonucleotide sequence, and (ii) a plurality of fourth sequencing platform tag-containing oligonucleotides that each comprise an oligonucleotide sequence that is capable of specifically hybridizing to the fourth universal adaptor oligonucleotide sequence and a fourth sequencing platform-specific oligonucleotide sequence that is linked to and positioned 5′ to the fourth universal adaptor oligonucleotide sequence.

[0056] In another embodiment, the step of contacting takes place under conditions and for a time sufficient to amplify both of the first and second reverse-transcribed cDNA products of (2), to obtain a DNA library for sequencing. In one embodiment, the method includes sequencing the DNA library obtained in (3) to obtain a data set of sequences encoding the first and second polypeptide sequences of the adaptive immune receptor heterodimer.

[0057] In yet another embodiment, the method includes (a) sorting the data set of sequences according to oligonucleotide barcode sequences identified therein to obtain a plurality of barcode sequence sets each having a unique barcode and (b) sorting each barcode sequence set of (a) into an X1 sequence-containing subset and an X2 sequence-containing subset. The method can further include (c) clustering members of each of the X1 and X2 sequence-containing subsets according to X1 and X2 sequences to obtain one or a plurality of X1 sequence cluster sets and one or a plurality of X2 sequence cluster sets, respectively, and error-correcting single nucleotide barcode sequence mismatches within any one or more of said X1 and X2 sequence cluster sets.

[0058] In another embodiment, the method includes (d) identifying each first and second adaptive immune receptor heterodimer polypeptide encoding sequence based on known X1 and X2 sequences, wherein each X1 sequence and each X2 sequence is associated with one or a plurality of unique B sequences to identify the container from which each B sequence-associated X1 sequence and each B sequence-associated X2 sequence originated. In some embodiments, the method includes (e) combinatorically matching B sequence-associated X1 and X2 sequences of (d) as being of common clonal origin based on a probability of B sequences that are coincident with common first and second adaptive immune receptor heterodimer polypeptide encoding sequences, and therefrom determining that rearranged DNA sequences encoding first and second polypeptide sequences of the adaptive immune receptor heterodimer originated in a single lymphoid cell.

[0059] In one embodiment, the first oligonucleotide amplification primer set is capable of amplifying, in the rearranged DNA sequence encoding the first polypeptide, a rearranged DNA sequence encoding a first complementarity determining region-3 (CDR3) of the first polypeptide. In another embodiment, the second oligonucleotide amplification primer set is capable of amplifying, in the rearranged DNA sequence encoding the second polypeptide, a rearranged DNA sequence encoding a second complementarity determining region-3 (CDR3) of the second polypeptide.

[0060] In certain embodiments, the first polypeptide of the adaptive immune receptor heterodimer is a TCR alpha (TCRA) chain and the second polypeptide of the adaptive immune receptor heterodimer is a TCR beta (TCRB) chain, or (b) the first polypeptide of the adaptive immune receptor heterodimer is a TCR gamma (TCRG) chain and the second polypeptide of the adaptive immune receptor heterodimer is a TCR delta (TCRD) chain, or (c) the first polypeptide of the adaptive immune receptor heterodimer is an immunoglobulin heavy (IGH) chain and the second polypeptide of the adaptive immune receptor heterodimer is an immunoglobulin light (IGL, IGK, or both IGL and IGK) chain.

[0061] In certain other embodiments, one or more of the containers comprises a third oligonucleotide amplification primer set that is capable of amplifying a third cDNA sequence that encodes a lymphocyte status indicator molecule and that comprises a composition comprising a plurality of oligonucleotides having a plurality of oligonucleotide sequences of general formula (VI): U5/6-B3-X3 (VI). In some embodiments, U5/6 comprises an oligonucleotide which comprises a fifth universal adaptor oligonucleotide sequence when B3 is present or a sixth universal adaptor oligonucleotide sequence when B3 is nothing. In one embodiment, B3 comprises an oligonucleotide that comprises either nothing or a third oligonucleotide barcode sequence of 6, 7, 8, 9, 10, 11, 12, 13, 14, 15, 16, 17, 18, 19 or 20 contiguous nucleotides that is either the same as or different than at least one of B1 or B2. In another embodiment, X3 comprises an oligonucleotide that is one of (i) a forward primer polynucleotide of 15-80 contiguous nucleotides of a lymphocyte status indicator molecule encoding gene sequence, or the complement thereof, and (ii) a reverse primer polynucleotide of 15-80 contiguous nucleotides of a lymphocyte status indicator molecule encoding gene sequence, or the complement thereof, and in each of the plurality of oligonucleotide sequences of general formula U5/6-B3-X3, X3 comprises a unique oligonucleotide sequence.

[0062] In certain embodiments, the lymphocyte status indicator molecule comprises one or more of FoxP3, CD4, CD8, CD11a, CD18, CD21, CD25, CD29, CCD30, CD38, CD44, CD45, CD45RA, CD45RO, CD49d, CD62, CD62L, CD69, CD71, CD103, CD137 (4-1BB), CD138, CD161, CD294, CCR5, CXCR4, IgA H-chain constant region, IgA H-chain constant region, IgE H-chain constant region, IgD H-chain constant region, IgM H-chain constant region, HLA-DR, IL-2, IL-5, IL-6, IL-9, IL-10, IL-12, IL-13, IL-15, IL-21, TGF-β, TLR1, TLR2, TLR3, TLR4, TLR5, TLR6, TLR7, TLR8, TLR9 and TLR10.

[0063] These and other aspects of the herein described invention embodiments will be evident upon reference to the following detailed description and attached drawings. All of the U.S. patents, U.S. patent application publications, U.S. patent applications, foreign patents, foreign patent applications and non-patent publications referred to in this specification and/or listed in the Application Data Sheet are incorporated herein by reference in their entirety, as if each was incorporated individually. Aspects and embodiments of the invention can be modified, if necessary, to employ concepts of the various patents, applications and publications to provide yet further embodiments.

### BRIEF DESCRIPTION OF THE SEVERAL VIEWS OF THE DRAWINGS

[0064] FIG. 1 depicts a schematic representation of certain herein described compositions and methods. U1 and U2 represent universal adaptor oligonucleotides. BC1 and BC2 represent barcode oligonucleotides. J represents an adaptive immune receptor joining (J) region gene and Jpr represents a region of such a gene to which a J-specific oligonucleotide primer specifically anneals. V represents an adaptive immune receptor variable (V) region gene and Vpr represents a region of such a gene to which a V-specific oligonucleotide primer specifically anneals. NDN represents the diversity (D) region found in some adaptive immune receptor encoding genes, flanked on either side by junctional nucleotides (N) which may include non-templated nucleotides. Adap 1 and Adap2 represent sequencing platform-specific adapters. The segment shown as “n6” represents a spacer nucleotide segment of any nucleotide sequence, in this case, a spacer of six randomly selected nucleotides.

[0065] FIG. 2 depicts a schematic representation of certain herein described compositions and methods in which individual first and second microdroplets are contacted to permit fusion events between single first and second microdroplets, by which fusion events DNA from individual lymphoid cells (e.g., T or B cells) is introduced, within a fused microdroplet, to first and second oligonucleotide amplification primer sets that are capable of amplifying, respectively, DNA encoding sequences (e.g., CDR3 encoding DNA) of first and second adaptive immune receptor polypeptide encoding genes from the same cell. Amplification and oligonucleotide barcode labeling of at least two rearranged DNA loci from the same cell are thus contemplated as described herein, e.g., [IGH+IGL], [IGH+IGK], [IGH+IGK+IGL], [TCRA+TCRB], [TCRG+TCRG], etc.

[0066] FIG. 3 depicts a schematic representation of certain herein described compositions and methods according to which, for example, DNA from individual lymphoid cells (e.g., T or B cells), or cDNA that has been reverse transcribed from mRNA of single lymphoid cells, is introduced, within a fused microdroplet, to first and second oligonucleotide amplification primer sets that are capable of amplifying, respectively, DNA encoding sequences (e.g., CDR3 encoding DNA) of first and second adaptive immune receptor polypeptide encoding genes from the same cell, after which the individual microdroplets are disrupted (e.g., by chemical, physical and/or mechanical dissolution, dissociation, breakage, etc.) and the released bar-coded double-stranded DNAs are amplified with universal oligonucleotide primers and sequencing platform-specific adapters to permit large-scale multiplexed quantitative sequencing. See Brief Description of FIG. 1 for abbreviations.

[0067] FIG. 4 depicts a schematic representation of labeling adaptive immune receptor polypeptide encoding cDNA during reverse transcription by using an oligonucleotide reverse transcription primer that directs incorporation of oligonucleotide barcode and universal adaptor oligonucleotide sequences into cDNA.

[0068] FIG. 5 depicts a schematic representation of labeling adaptive immune receptor polypeptide encoding cDNA during reverse transcription by using an oligonucleotide reverse transcription primer that directs incorporation of oligonucleotide barcode and universal adaptor oligonucleotide sequences into cDNA.

[0069] FIG. 6 presents a schematic representation of a DNA product that is amenable to sequencing following modification with Illumina sequencing adapters of amplified adaptive immune receptor polypeptide encoding cDNA that has been labeled during reverse transcription by using an oligonucleotide reverse transcription primer that directs incorporation of oligonucleotide barcode and universal adaptor oligonucleotide sequences.

### DETAILED DESCRIPTION OF THE INVENTION

[0070] The present invention provides, in certain embodiments and as described herein, compositions and methods that are useful for reliably quantifying and determining the sequences of large and structurally diverse populations of rearranged genes encoding adaptive immune receptors, such as immunoglobulins (IG) and/or T cell receptors (TCR). These rearranged genes may be present in a biological sample containing DNA from lymphoid cells of a subject or biological source, including a human subject, and/or mRNA transcripts of these rearranged genes may be present in such a sample and used as templates for cDNA synthesis by reverse transcription.

[0071] Disclosed herein are unexpectedly advantageous approaches for uniquely and unambiguously labeling individual, sequence-distinct IG and TCR encoding gene segments or mRNA transcripts thereof, or cDNA that has been reverse transcribed from such mRNA transcripts, by performing such labeling prior to conventional steps of expanding a population of such gene segments or transcripts thereof (including reverse transcripts) through established nucleic acid amplification techniques. Without wishing to be bound by theory, by labeling individual TCR and IG encoding gene segments or transcripts thereof (including complementary DNA generated by reverse transcription) as described herein, prior to commonly practiced amplification steps which are employed to generate DNA copies in sufficient quantities for sequencing, the present embodiments offer unprecedented sensitivity in the detection and quantification of diverse TCR and IG encoding sequences, while at the same time avoiding misleading, inaccurate or incomplete results that may occur due to biases in oligonucleotide primer utilization during multiple rounds of nucleic acid amplification from an original sample, using a sequence-diverse set of amplification primers.

[0072] Also described herein in certain embodiments are unprecedented compositions and methods that permit quantitative determination of the sequences encoding both polypeptides in an adaptive immune receptor heterodimer from a single cell, such as both TCRA and TCRB from a T cell, or both IgH and IgL from a B cell. By providing the ability to obtain such information from a complex sample such as a sample containing a heterogeneous mixture of T and/or B cells from a subject, these and related embodiments permit more accurate determination of the relative representation in a sample of particular T and/or B cell clonal populations than has previously been possible.

[0073] Certain embodiments contemplate modifications as described herein to oligonucleotide primer sets that are used in multiplexed nucleic acid amplification reactions to generate a population of amplified rearranged DNA molecules from a biological sample containing rearranged genes encoding adaptive immune receptors, prior to quantitative high throughput sequencing of such amplified products. Multiplexed amplification and high throughput sequencing of rearranged TCR and BCR encoding DNA sequences are described, for example, in Robins et al., 2009 Blood 114:4099; Robins et al., 2010 Sci. Translat. Med. 2:47ra64; Robins et al., 2011 J. Immunol. Meth. doi:10.1016/j.jim.2011.09. 001; Sherwood et al. 2011 Sci. Translat. Med. 3:90ra61; U.S. Ser. No. 13/217,126 (US Pub. No. 2012/0058902), U.S. Ser. No. 12/794,507 (US Pub. No. 2010/0330571), WO/2010/151416, WO/2011/106738 (PCT/US2011/026373), WO2012/027503 (PCT/US2011/049012), U.S. Ser. No. 61/550,311, and U.S. Ser. No. 61/569,118; accordingly these disclosures are incorporated by reference and may be adapted for use according to the embodiments described herein.

[0074] According to certain embodiments, in a sample containing a plurality of sequence-diverse TCR or IG encoding gene segments, such as a sample comprising DNA (or mRNA transcribed therefrom or cDNA reverse-transcribed from such mRNA) from lymphoid cells in which DNA rearrangements have taken place to encode functional TCR and/or IG heterodimers (or in which non-functional TCR or IG pseudogenes have been involved in DNA rearrangements), a plurality of individual TCR or IG encoding sequences may each be uniquely tagged with a specific oligonucleotide barcode sequence as described herein, through a single round of nucleic acid amplification (e.g., polymerase chain reaction PCR). The population of tagged polynucleotides can then be amplified to obtain a library of tagged molecules, which can then be quantitatively sequenced by existing procedures such as those described, for example, in U.S. Ser. No. 13/217,126 (US Pub. No. 2012/0058902), U.S. Ser. No. 12/794,507 (US Pub. No. 2010/0330571), WO/2010/151416, WO/2011/106738 (PCT/US2011/026373), WO2012/027503 (PCT/US2011/049012), U.S. Ser. No. 61/550,311, and U.S. Ser. No. 61/569,118.

[0075] In the course of these sequence reads, the incorporated barcode tag sequence is sequenced and can be used as an identifier in the course of compiling and analyzing the sequence data so obtained. In certain embodiments, it is contemplated that for each barcode tag sequence, a consensus sequence for the associated TCR or IG sequences may be determined. A clustering algorithm can then be applied to identify molecules generated from the same original clonal cell population. By such an approach, sequence data of high quality can be obtained in a manner that overcomes inaccuracies associated with sequencing artifacts.

[0076] An exemplary embodiment is depicted in FIG. 1, according to which from a starting template population of genomic DNA or cDNA from a lymphoid cell-containing population, two or more cycles of PCR are performed using an oligonucleotide primer composition that contains primers having the general formula U1-B1ₙ-X as described herein. As shown in Figure (FIG. 1, the J-specific primer 110a contains a J primer sequence 100 that is complementary to a portion of the J segment, a barcode tag (BC1) 101 in FIG. 1, or B1ₙ in the generic formula) and also includes a first external universal adaptor sequence (U1) 102, while the V-specific primer 110b includes a V primer sequence 103 that is complementary to a portion of the V segment and a second external universal adaptor sequence (U2) 104. The invention need not be so limited, however, and also contemplates related embodiments, such as those where the barcode may instead or may in addition be present as part of the V-specific primer and is situated between the V-sequence and the second universal adaptor. It will be appreciated that based on the present disclosure, those skilled in the art can design other suitable primers by which to introduce the herein described barcode tags to uniquely label individual TCR and/or IG encoding gene segments.

[0077] As described herein, a large number (up to 4ⁿ, where n is the length of the barcode sequence) of different barcode sequences are present in the oligonucleotide primer composition that contains primers having the general formula U1-B1ₙ-X as described herein, such that the PCR products of the large number of different amplification events following specific annealing of appropriate V- and J-specific primers are differentially labeled. In some embodiments, the number of barcode sequences is up to or smaller than 4ⁿ. In one embodiment, a set of 192 different barcode sequences are used based on a barcode of length n=8. The length of the barcode “n” determines the possible number of barcodes (4ⁿ as described herein), but in some embodiments, a smaller subset is used to avoid closely related barcodes or barcodes with different annealing temperatures. In other embodiments, as described herein, sets of m and n barcode sequences are used in subsequent amplification steps (e.g., to individually label each rearranged TCR or IG sequence and then to uniformally label (“tailing”) a set of sequences obtained from the same source, or sample In preferred embodiments, the V and J primers 100 and 103 are capable of promoting the amplification of a TCR or Ig encoding sequence that includes the CDR3 encoding sequence, which in FIG. 1 includes the NDN region 111. As also indicated in FIG. 1, following no more than two amplification cycles, the first amplification primer set 110a, 110b is separated from the double-stranded DNA product. By such a step, it is believed according to non-limiting theory that contamination of the product preparation by subsequent rounds of amplification is avoided, where contaminants could otherwise be produced by amplifying newly formed double-stranded DNA molecules with amplification primers that are present in the complex reaction but which are primers other than those used to generate the double-stranded DNA in the first one or two amplification cycles. A variety of chemical and biochemical techniques are known in the art for separating double-stranded DNA from oligonucleotide amplification primers.

[0078] Once the first amplification primer set 110a, 110b is removed, by which the unique barcode tag sequences have been introduced, the tagged double-stranded DNA (dsDNA) products can be amplified using a second amplification primer set 120a, 120b as described herein and depicted in FIG. 1, to obtain a DNA library suitable for sequencing. The second amplification primer set advantageously exploits the introduction, during the preceding step, of the universal adaptor sequences 102, 104 (e.g., U1 and U2 in FIG. 1) into the dsDNA products. Accordingly, because these universal adaptor sequences have been situated external to the unique barcode tags (BC1) 101 in FIG. 1, the amplification products that comprise the DNA library to be sequenced retain the unique barcode identifier sequences linked to each particular rearranged V-J gene segment combination, whilst being amenable to amplification via the universal adaptors. An exemplary set of such a second primer set, also known as “tailing” primers, is shown in Table 7.

[0079] In preferred embodiments and as also depicted in FIG. 1, the second amplification primer set 120a, 120b may introduce sequencing platform-specific oligonucleotide sequences (Adap1 105 and Adap2 106 in FIG. 1), however these are not necessary in certain other related embodiments. The second amplification primer set 120a, 120b may also optionally introduce a second oligonucleotide barcode identifier tag (BC2 107 in FIG. 1), such as a single barcode sequence that may desirably identify all products of the amplification from a particular sample (e.g., as a source subject-identifying code) and ease multiplexing multiple samples to allow for higher throughput. The barcode (BC2; 107 in FIG. 1) is a modification that increases the throughput of the assay (e.g., allows samples to be multiplexed on the sequencer), but is not required. Alternatively, a universal primer without adaptors can be used to amplify the tagged molecules. After amplification, the molecules can be additionally tagged with platform specific oligonucleotide sequences. Such inclusion of a second, sample-identifying barcode, may beneficially aid in the identification of sample origins when samples from several different subjects are mixed, or in the identification of inadvertent contamination of one sample preparation with material from another sample preparation. The second amplification primer set may also, as shown in FIG. 1, optionally include a spacer nucleotide (“n6”; 108 in FIG. 1), which may facilitate the operation of the sequencing platform-specific sequences. The spacer improves the quality of the sequencing data, but is not required or present in certain embodiments. The spacer is specifically added to increase the number of random base pairs during the first 12 cycles of the sequencing step of the method. By increasing the diversity of the first 12 cycles, cluster definition and basecalling is improved. The spacer nucleotide 108 may be 0, 1, 2, 3, 4, 5, 6, 7, 8, 9, 10, 11-20, 21-30 or more nucleotides of any sequence, typically a randomly generated sequence. Where it may be of concern that the presence of such random sequences will result in uneven annealing rates amongst the oligonucleotide primers containing such sequences, it may be preferred to perform a relatively small number of amplification cycles, typically three, four or five cycles, or optionally 1-6 or no more than eight cycles, to reduce the potential for unevenness in amplification that could skew downstream results.

[0080] The resulting DNA library can then be sequenced according to standard methodologies and using available instrumentation as provided herein and known in the art. Where a second, sample-identifying barcode (BC2 107 in FIG. 1) is present, sequencing that includes reading both such barcodes is performed, with the sequence information (V-J junction including CDR3 encoding sequence, along with the first oligonucleotide barcode BC1 101 that uniquely tags each distinct sequence) between the two occurrences of the sample-identifying barcode 107 also being read. Sequencing primers may include, for instance, and with reference to FIG. 1, the universal primer 102 on the J side of NDN 111 for the first read, followed by a barcode sequence BC1 101, a J primer sequence 100 and CDR3 sequences. The second set of amplification primers include a forward primer comprising the platform-specific primer (Adap1 105) on the J side, a spacer sequence comprising random nucleotides (labeled “n6”; 108 in FIG. 1), and BC2 sample-identifying barcodes 107. The reverse primer in the second set of amplification primers includes the universal primer 104 on the V side of NDN 111, a spacer sequence 108 comprising random nucleotides, and a BC2 sample-identifying barcode sequence 107, and optionally a paired-end read using the reverse second sequencing platform-specific primer (Adap2 106). The second sequencing platform-specific primer (Adap2 106) is used to sequence and “read” the spacer sequence 108, the sample-identifying barcode sequence BC2 107, the universal adaptor sequence 104, the V sequence 103, and NDN 111. To capture the CDR3 sequence, one can use J amplification primers, C amplification primers or the V amplification primers.

[0081] Sequence data may be sorted using the BC2 sample-identifying barcodes 107 and then further sorted according to sequences that contain a common first barcode BC1 101. Within such sorted sequences, CDR3 sequences may be clustered to determine whether more than one sequence cluster is present using any of a known variety of algorithms for clustering (e.g., BLASTClust, UCLUST, CD-HIT, or others, or as described in Robins et al., 2009 Blood 114:4099). Additionally or alternatively, sequence data may be sorted and selected on the basis of those sequences that are found at least twice. Consensus sequences may then be determined by sequence comparisons, for example, to correct for sequencing errors. Where multiple unique identifier barcode tags (BC1 101) are detected among sequences that otherwise share a common consensus sequence, the number of such barcode tags that is identified may be regarded as reflective of the number of molecules in the sample from the same T cell or B cell clone.

[0082] Identifying Both Chains of a TCR Or IG Heterodimer from a Single Adaptive Immune Cell

[0083] As also noted above, in certain other embodiments there is provided herein a method for determining rearranged DNA sequences (or mRNA sequences transcribed therefrom or cDNA that has been reverse transcribed from such mRNA) encoding first and second polypeptide sequences of an adaptive immune receptor heterodimer in a single lymphoid cell. The method includes uniquely labeling each rearranged DNA sequence with a unique barcode sequence for identifying a particular cell and/or sample.

[0084] Briefly, and by way of illustration and not limitation, these and related embodiments comprise a method comprising steps of (1) in each of a plurality of parallel reactions, contacting first and second microdroplets and permitting them to fuse under conditions permissive for nucleic acid amplification, to generate double-stranded DNA products (or single-stranded cDNA products) that all contain an identical barcode oligonucleotide sequence and that correspond to the two chains of an adaptive immune receptor heterodimer; (2) disrupting the fused microdroplets to obtain a heterogeneous mixture of double-stranded (or single-stranded) DNA products; (3) amplifying the heterogeneous mixture of double-stranded DNA (or single-stranded) products to obtain a DNA library for sequencing; and (4) sequencing the library to obtain a data set of DNA sequences encoding the first and second polypeptides of the heterodimer.

[0085] The method comprises contacting and permitting to fuse in pairwise fashion (A) individual first microdroplets that each (or in every n^{th} droplet) contain a single lymphoid cell or genomic DNA isolated therefrom, or cDNA has been reverse transcribed from mRNA, with (B) individual second microdroplets from a plurality of second liquid microdroplets that each contain two oligonucleotide amplification primer sets, the first set for amplifying any rearranged DNA that encodes the first chain of an adaptive immune receptor heterodimer (e.g., an IGH chain, or a TCRA chain), and the second set for amplifying any rearranged DNA that encodes the second chain of the heterodimer (e.g., an IGL chain, or a TCRB chain). Significantly, in a given second microdroplet, all oligonucleotide amplification primers will comprise the same barcode oligonucleotide, but within different second microdroplets, the primer sets will comprise different barcode sequences. The step of contacting is controlled so that in each of a plurality of events, a single first microdroplet fuses with a single second microdroplet to obtain a fused microdroplet. The contents of each of the first and second microdroplets come into contact with one another in the fused microdroplet. Oligonucleotide amplification primer sets capable of amplifying any rearranged DNA encoding a given TCR or IG polypeptide are described elsewhere herein and in the references incorporated for such disclosure.

[0086] Those familiar with the art will be aware of any of a number of microfluidics apparatus and devices by which microdroplet compositions that have defined contents and properties (such as the ability to controllably undergo fusion) may be prepared, such as the RainDance™ microdroplet digital PCR system (RainDance Technologies, Lexington, Mass.) or any of the systems described, for example, in Pekin et al., 2011 Lab Chip 11:2156; Miller et al., 2012 Proc. Nat. Acad. Sci. USA 109:378; Brouzes et al., 2009 Proc. Nat. Acad. Sci. USA 106:14195; Joensson et al., 2009 Angew. Chem. Int. Ed. 81:4813; Baret et al., 2009 Lab Chip 9:1850; Frenz et al., 2009 Lab Chip 9:1344; Kiss et al., 2008 Anal. Chem. 80:8975; Leamon et al., 2006 Nat. Meths. 3:541; which may be adapted to a particular method such as those described herein through modifications that are routine in view of the present disclosure.

[0087] As a non-limiting example, certain embodiments may exploit the properties of aqueous phase microdroplets dispersed in an oil phase using microfluidic channels. Microdroplets may be water-in-oil emulsions, oil-in-water emulsions, or similar aqueous and non-aqueous emulsion compositions. Microdroplets may also be called microdroplets or micellar microdroplets. Conventional water-in-oil (WO) emulsions have found many applications in biology, including next-generation sequencing (Margulies et al., Nature 2005, 437, 376-380), rare mutation detection (Diehl, F. et al. Proc. Natl. Acad. Sci. U.S.A. 2005, 102, 16368-16373; Li, M. et al., Nat. Methods 2006, 3, 95-97; Diehl, F. et al., Nat. Med. 2008, 14, 985-990) and quantitative detection of DNA methylation (Li, M. et al., Nat. Biotechnol. 2009, 27, 858-U118), but these emulsions suffer from droplet polydispersity and shearing stresses which can disrupt cells during mechanical agitation used to form the emulsions. The use of microfluidics overcomes these limitations and leads to an improved performance of biochemical and cell based assays (Zeng, Y. et al., Anal. Chem. 2010, 82, 3183-3190). Microfluidic chips with channel diameters of 10-100 μm are typically fabricated from quartz, silicon, glass, or polydimethylsiloxane (PDMS) using standard soft photolithography techniques (A. Manz, N. Graber and H. M. Widmer: Miniaturized total Chemical Analysis systems: A Novel Concept for Chemical Sensing, Sensors and Actuators, B Chemical (1990) 244-248). Droplets are typically generated at rates of ˜1-10 Hz by flowing an aqueous solution in one channel into a stream of oil. The use of flow focusing nozzles enables generation of controlled size droplets of aqueous phase. The droplet size and rate of droplet generation are controlled by the ratio of oil and aqueous phase flow rates, for a given nozzle geometry. The chip channel surface is usually modified to be hydrophobic, for instance, by one of the many published silanization chemistries (Zeng, Y. et al., Anal. Chem. 2010, 82, 3183-3190). For droplets to be fully functional microvessels, the use of hydrophobic and lipophobic oils may be beneficial, since the molecular diffusion between droplets is minimized, the oils have low solubility for biological reagents contained in the aqueous phase and have good gas solubility, which ensures viability of encapsulated cells in certain applications. In addition, surfactants may desirably, according to certain embodiments, be mixed into the oil phase, since droplets tend to coalesce. Surfactants may also inhibit adsorption of biomolecules at the microdroplet interfaces. A novel class of block copolymer surfactants, comprising perfluorinated polyethers (PFPE) coupled to polyethyleneglycol (PEG), has been described for use with fluorocarbon oils, for example, the fluorinated oil FC-40 (Sigma), a mix of perfluoro tri-n-butyl amine with di(perfluoro(n-butyl))perfluoromethyl amine (Holtze, C. et al., Lab Chip, 2008, DOI: 10.1039/b806706f). These compositions have led to very stable, biocompatible emulsions (Brouzes, E., et al., PNAS 2009, 106(34), 14195-14200).

[0088] Droplets traveling in microfluidic channels may be maintained as discrete microdroplets by means of their surface tension. Various methods have also been proposed to overcome the surface tension and allow droplets to merge when desired, thus allowing reagent mixing, e.g., by microfabrication of passive, flow reducing elements in channels (Niu, X. et al., Lab Chip 2008, 8, 1837-1841), by the use of electrostatic charge (electrocoalescence) (Zagnoni, M. et al., Langmuir, 2010, 26(18), 14443-14449), or by manipulating microchannel geometry (Dolomite Merger chip; see also WO/2012/083225). A method of adding reagents to droplets in microfluidic channels via picoinjectors (pressurized reagent filled channels, perpendicular to the droplet channel, operated by electric fields), has recently been published (Abate, A. R. et al., PNAS 2010, 107(45), 19163-19166) and may also be adapted according to certain presently contemplated embodiments as described herein.

[0089] The microdroplet contents and the step of contacting are selected to be permissive for nucleic acid amplification interactions between the genomic DNA and the amplification primers. Nucleic acid amplification (e.g., PCR) reagents and conditions are well known. Such amplification is permitted to proceed at least to obtain first and second double-stranded DNA products that include the nucleotide sequences of the first and second oligonucleotide amplification primers as provided herein, and the complementary sequences thereto. Thus, for example, any single fused microdroplet may contain (i) a first double-stranded DNA product that comprises at least a first universal adaptor sequence, the barcode sequence, a V region and a J or C region sequence that encode a portion of the first adaptive immune receptor polypeptide of the heterodimer, and a second universal adaptor sequence, and (ii) a second double-stranded DNA product that comprises at least a third universal adaptor sequence, the same barcode sequence as in (i), a V region and a J or C region sequence that encode a portion of the second adaptive immune receptor polypeptide of the heterodimer, and a fourth universal adaptor sequence.

[0090] Conditions for the amplification step in the fused microdroplets are stopped prior to the next step. This can be achieved by changing the temperature of the environment in which the microdroplets are contained (e.g., in a container or well) to stop the amplification process.

[0091] In some embodiments, the method comprises disrupting the plurality of fused microdroplets to obtain a heterogeneous mixture of the first and second double-stranded products. Disruption may be selected on the basis of the chemical properties and composition of the microdroplets, and may be achieved, for instance, by chemical, biochemical and/or physical manipulations, such as the introduction of a diluent, detergent, chaotrope, surfactant, osmotic agent, or other chemical agent, or by the use of sonication, pressure, electrical field or other disruptive conditions. It will be appreciated that preferred conditions will involve the use of aqueous solvents for the included volumes within the microdroplets and/or for the heterogeneous mixture that is obtained by the step of disrupting. By using microdroplets instead of individual cells as an assay format, one can analyze data on the number of input cells in the sample. One can correct for PCR and sequencing errors, and in the case of IG molecules differentiate between non-germline sequences due to somatic hypermutation (SHM) from non-germline sequences introduced due to PCR error.

[0092] In some embodiments, the method comprises an ensuing step for contacting the mixture of first and second double-stranded DNA products with the herein described third and fourth amplification primer sets. Conditions for this step may similarly be achieved using accepted methodologies for DNA amplification to obtain a DNA library for sequencing, which may also be achieved according to any of a number of established DNA sequencing technologies. In certain related embodiments, instead of using first liquid microdroplets that each contain a single lymphoid cell or genomic DNA isolated therefrom, each of the first liquid microdroplets contains complementary DNA (cDNA) that has been reverse transcribed from the mRNA of a single lymphoid cell, such as a first cDNA that encodes the first chain of the adaptive immune receptor heterodimer and a second cDNA that encodes the second chain of the heterodimer.

[0093] In certain related embodiments, the individual second microdroplets may each contain a third oligonucleotide primer set that is capable of amplifying additional cDNA sequences that encode a lymphocyte status indicator molecule or molecules, The third primer set is labeled with the same barcode sequence that is present in the first and second primer sets that are in the microdroplet. In such embodiments, the biological status can be determined for the single source cell from which a given TCR or IG heterodimeric sequence is identified. The biological status can be activated vs. quiescent, maturational stage, naïve vs. memory, regulatory vs. effector, etc. Exemplary lymphocyte status indicator molecules include, e.g., lck, fyn, FoxP3, CD4, CD8, CD11a, CD18, CD25, CD28, CD29, CD44, CD45, CD49d, CD62, CD69, CD71, CD103, CD137 (4-1BB), HLA-DR, etc.

[0094] Certain embodiments include a third oligonucleotide primer set that is capable of amplifying a third cDNA sequence that encodes a lymphocyte status indicator molecule, where the third oligonucleotide primer set is labeled with the same barcode sequence that is present in the first and second primer sets, and where the lymphocyte status indicator molecule comprises one or more of the following: FoxP3, CD4, CD8, CD11a, CD18, CD21, CD25, CD29, CCD30, CD38, CD44, CD45, CD45RA, CD45RO, CD49d, CD62, CD62L, CD69, CD71, CD103, CD137 (4-1BB), CD138, CD161, CD294, CCR5, CXCR4, IgA H-chain constant region, IgA H-chain constant region, IgE H-chain constant region, IgD H-chain constant region, IgM H-chain constant region, HLA-DR, IL-2, IL-5, IL-6, IL-9, IL-10, IL-12, IL-13, IL-15, IL-21, TGF-β, TLR1, TLR2, TLR3, TLR4, TLR5, TLR6, TLR7, TLR8, TLR9 and TLR10.

TABLE 1
EXEMPLARY LYMPHOCYTE STATUS INDICATORS

| | | Human Transcript |
|---|---|---|
| Gene Name | Status Marker for: | Sequence Accession # |
| FOXP3 | Treg cells | NM_014009, |
| | | NM_001114377 |
| IL9 | Th9 cells | NM_000590 |
| CD21 | EBV receptor on B cells | NM_001006658, |
| | | NM_001877 |
| CD30 | Activated T and B cells, NK cells | NM_001243, NM_152942 |
| | monocytes, and Reed-Sternburg cells | |
| | (Hodgkin's Lymphoma) | |
| CD38 | Plasma cells, activated B and T cells | NM_001775 |
| CD138 | Plasma cells | NM_001006946, |
| | | NM_002997 |
| CD45RA | Naive T cells | NM_002838, NM_080921, |
| | | NM_001267798 |
| CD45RO | Memory T cells | NM_002838, NM_080921, |
| | | NM_001267798 |
| CD62L | Homing of naive cells to peripheral lymph | NM_000655 |
| | nodes | |
| CD294 | TH2 cells | NM_004778 |
| Helios | Thymic Treg cells | NM_001079526, |
| | | NM_016260 |
| CD161 | NK cells | NM_002258 |
| IL2 | CD4⁺ T cells and some CD8⁺ T cells | NM_000586 |
| IL5 | TH2 cells | NM_000879 |
| IL6 | Macrophages, endothelial cells, and T cells | NM_000600 |
| IL10 | Macrophages and TH2 cells | NM_000572 |
| TGF-β | T cells and macrophages | NM_000660 |
| IL12B | Macrophages and dendritic cells | NM_002187 |
| IL12A | Macrophages and dendritic cells | NM_000882 |
| IL13 | TH2 cells | NM_002188 |
| IL15 | Macrophages | NM_0172175, NM_000585 |
| IL21 | Activated T cells (mainly TH2, TH17, and | NM_021803, |
| | NKT cells) | NM_001207006 |
| CCR5 | T cells and macrophages | NM_000579, |
| | | NM_001100168 |
| CXCR4 | T cells | NM_003467, |
| | | NM_001008540 |
| IGHG1 | IgG1 heavy chain constant region | AJ294730, J00228 |
| IGHG2 | IgG2 heavy chain constant region | AJ294731, J00230 |
| IGHG3 | IgG3 heavy chain constant region | D78345 |
| IGHG4 | IgG4 heavy chain constant region | AJ294733, K01316 |
| IGHA1 | IgA1 heavy chain constant region | J00220 |
| IGHA2 | IgA2 heavy chain constant region | M60192, J00221 |
| IGHE | IgGE1 heavy chain constant region | L00022, J00222 |
| IGHD | IgD heavy chain constant region | K02875, K02876, K02877, |
| | | K02878, K02879, K02880, |
| | | K02881, K02992, X57331 |
| IGHM | IgM heavy chain constant region | J00260, K01310, X14939, |
| | | X14940, X57331 |
| TLR1 | B cells | NM_003263 |
| TLR2 | T and B cells | NM_003264 |
| TLR3 | T cells | NM_003265 |
| TLR4 | T cells | NM_003266, NM_138554, |
| | | NM_138557 |
| TLR5 | Treg and naive T cells | NM_003268 |

[0095] These and related embodiments need not be so limited, however, such that there are also contemplated embodiments according to which, additionally or alternatively, there may be included a third oligonucleotide primer set that is capable of amplifying a third cDNA sequence that encodes a lymphocyte status indicator molecule, where the third primer set is labeled with the same barcode sequence that is present in the first and second primer sets, and where the lymphocyte status indicator molecule comprises a cell surface receptor.

[0096] Examples of cell surface receptors include the following, or the like: CD2 (e.g., GenBank Acc. Nos. Y00023, SEG_HUMCD2, M16336, M16445, SEG_MUSCD2, M14362), 4-1BB (CDw137, Kwon et al., 1989 Proc. Nat. Acad. Sci. USA 86:1963, 4-1BB ligand (Goodwin et al., 1993 Eur. J. Immunol. 23:2361; Melero et al., 1998 Eur. J. Immunol. 3:116), CD5 (e.g., GenBank Acc. Nos. X78985, X89405), CD10 (e.g., GenBank Acc. Nos. M81591, X76732) CD27 (e.g., GenBank Acc. Nos. M63928, L24495, L08096), CD28 (June et al., 1990 Immunol. Today 11:211; see also, e.g., GenBank Acc. Nos. J02988, SEG_HUMCD28, M34563), CD152/CTLA-4 (e.g., GenBank Acc. Nos. L₁₅₀₀₆, X05719, SEG_HUMIGCTL), CD40 (e.g., GenBank Acc. Nos. M83312, SEG_MUSC040A0, Y10507, X67878, X96710, U15637, L07414), interferon-γ (IFN-γ; see, e.g., Farrar et al. 1993 Ann. Rev. Immunol. 11:571 and references cited therein, Gray et al. 1982 Nature 295:503, Rinderknecht et al. 1984 J. Biol. Chem. 259:6790, DeGrado et al. 1982 Nature 300:379), interleukin-4 (IL-4; see, e.g., 53^{rd} Forum in Immunology, 1993 Research in Immunol. 144:553-643; Banchereau et al., 1994 in The Cytokine Handbook, 2^{nd} ed., A. Thomson, ed., Academic Press, NY, p. 99; Keegan et al., 1994 J Leukocyt. Biol. 55:272, and references cited therein), interleukin-17 (IL-17) (e.g., GenBank Acc. Nos. U32659, U43088) and interleukin-17 receptor (IL-17R) (e.g., GenBank Acc. Nos. U31993, U58917).

[0097] Additional cell surface receptors include the following or the like: CD59 (e.g., GenBank Acc. Nos. SEG_HUMCD590, M95708, M34671), CD48 (e.g., GenBank Acc. Nos. M59904), CD58/LFA-3 (e.g., GenBank Acc. No. A25933, Y00636, E12817; see also JP 1997075090-A), CD72 (e.g., GenBank Acc. Nos. AA311036, 540777, L35772), CD70 (e.g., GenBank Acc. Nos. Y13636, S69339), CD80/B7.1 (Freeman et al., 1989 J. Immunol. 43:2714; Freeman et al., 1991 J. Exp. Med. 174:625; see also e.g., GenBank Acc. Nos. U33208, 1683379), CD86/B7.2 (Freeman et al., 1993 J. Exp. Med. 178:2185, Boriello et al., 1995 J. Immunol. 155:5490; see also, e.g., GenBank Acc. Nos. AF099105, SEG_MMB72G, U39466, U04343, SEG_HSB725, L25606, L25259), B7-H1/B7-DC (e.g., Genbank Acc. Nos. NM_{—}014143, AF177937, AF317088; Dong et al., 2002 Nat. Med. June 24 [epub ahead of print], PMID 12091876; Tseng et al., 2001 J. Exp. Med. 193:839; Tamura et al., 2001 Blood 97:1809; Dong et al., 1999 Nat. Med. 5:1365), CD40 ligand (e.g., GenBank Acc. Nos. SEG_HUMCD40L, X67878, X65453, L07414), IL-17 (e.g., GenBank Acc. Nos. U32659, U43088), CD43 (e.g., GenBank Acc. Nos. X52075, J04536), ICOS (e.g., Genbank Acc. No. AH011568), CD3 (e.g., Genbank Acc. Nos. NM_{—}000073 (gamma subunit), NM_{—}000733 (epsilon subunit), X73617 (delta subunit)), CD4 (e.g., Genbank Acc. No. NM_{—}000616), CD25 (e.g., Genbank Acc. No. NM_{—}000417), CD8 (e.g., Genbank Acc. No.M12828), CD11b (e.g., Genbank Acc. No. J03925), CD14 (e.g., Genbank Acc. No. XM_{—}039364), CD56 (e.g., Genbank Acc. No.U63041), CD69 (e.g., Genbank Acc. No. NM_{—}001781) and VLA-4 (αᵢβ₇) (e.g., GenBank Acc. Nos. L12002, X16983, L20788, U97031, L24913, M68892, M95632).

[0098] The following cell surface receptors are typically associated with B cells: CD19 (e.g., GenBank Acc. Nos. SEG_HUMCD19W0, M84371, SEG_MUSCD19W, M62542), CD20 (e.g., GenBank Acc. Nos. SEG_HUMCD20, M62541), CD22 (e.g., GenBank Acc. Nos. 1680629, Y10210, X59350, U62631, X52782, L16928), CD30 (e.g., Genbank Acc. Nos. M83554, D86042), CD153 (CD30 ligand, e.g., GenBank Acc. Nos. L09753, M83554), CD37 (e.g., GenBank Acc. Nos. SEG_MMCD37X, X14046, X53517), CD50 (ICAM-3, e.g., GenBank Acc. No. NM_{—}002162), CD106 (VCAM-1) (e.g., GenBank Acc. Nos. X53051, X67783, SEG_MMVCAM1C, see also U.S. Pat. No. 5,596,090), CD54 (ICAM-1) (e.g., GenBank Acc. Nos. X84737, 582847, X06990, J03132, SEG_MUSICAMO), interleukin-12 (see, e.g., Reiter et al, 1993 Crit. Rev. Immunol. 13:1, and references cited therein), CD134 (OX40, e.g., GenBank Acc. No. AJ277151), CD137 (41BB, e.g., GenBank Acc. No. L12964, NM_{—}001561), CD83 (e.g., GenBank Acc. Nos. AF001036, AL021918), DEC-205 (e.g., GenBank Acc. Nos. AF011333, U19271).

[0099] Examples of other cell surface receptors include the following, or the like: HER1 (e.g., GenBank Accession Nos. U48722, SEG_HEGFREXS, KO3193), HER2 (Yoshino et al., 1994 J. Immunol. 152:2393; Disis et al., 1994 Canc. Res. 54:16; see also, e.g., GenBank Acc. Nos. X03363, M17730, SEG_HUMHER20), HER3 (e.g., GenBank Acc. Nos. U29339, M34309), HER4 (Plowman et al., 1993 Nature 366:473; see also e.g., GenBank Acc. Nos. L07868, T64105), epidermal growth factor receptor (EGFR) (e.g., GenBank Acc. Nos. U48722, SEG_HEGFREXS, KO3193), vascular endothelial cell growth factor (e.g., GenBank No. M32977), vascular endothelial cell growth factor receptor (e.g., GenBank Acc. Nos. AF022375, 1680143, U48801, X62568), insulin-like growth factor-I (e.g., GenBank Acc. Nos. X00173, X56774, X56773, X06043, see also European Patent No. GB 2241703), insulin-like growth factor-II (e.g., GenBank Acc. Nos. X03562, X00910, SEG_HUMGFIA, SEG_HUMGFI2, M17863, M17862), transferrin receptor (Trowbridge and Omary, 1981 Proc. Nat. Acad. USA 78:3039; see also e.g., GenBank Acc. Nos. X01060, M11507), estrogen receptor (e.g., GenBank Acc. Nos. M38651, X03635, X99101, U47678, M12674), progesterone receptor (e.g., GenBank Acc. Nos. X51730, X69068, M15716), follicle stimulating hormone receptor (FSH-R) (e.g., GenBank Acc. Nos. Z34260, M65085), retinoic acid receptor (e.g., GenBank Acc. Nos. L12060, M60909, X77664, X57280, X07282, X06538), MUC-1 (Barnes et al., 1989 Proc. Nat. Acad. Sci. USA 86:7159; see also e.g., GenBank Acc. Nos. SEG_MUSMUCIO, M65132, M64928) NY-ESO-1 (e.g., GenBank Acc. Nos. AJ003149, U87459), NA 17-A (e.g., European Patent No. WO 96/40039), Melan-A/MART-1 (Kawakami et al., 1994 Proc. Nat. Acad. Sci. USA 91:3515; see also e.g., GenBank Acc. Nos. U06654, U06452), tyrosinase (Topalian et al., 1994 Proc. Nat. Acad. Sci. USA 91:9461; see also e.g., GenBank Acc. Nos. M26729, SEG_HUMTYRO, see also Weber et al., J. Clin. Invest (1998) 102:1258), Gp-100 (Kawakami et al., 1994 Proc. Nat. Acad. Sci. USA 91:3515; see also e.g., GenBank Acc. No. 573003, see also European Patent No. EP 668350; Adema et al., 1994 J. Biol. Chem. 269:20126), MAGE (van den Bruggen et al., 1991 Science 254:1643; see also e.g, GenBank Acc. Nos. U93163, AF064589, U66083, D32077, D32076, D32075, U10694, U10693, U10691, U10690, U10689, U10688, U10687, U10686, U10685, L18877, U10340, U10339, L18920, U03735, M77481), BAGE (e.g., GenBank Acc. No. U19180, see also U.S. Pat. Nos. 5,683,886 and 5,571,711), GAGE (e.g., GenBank Acc. Nos. AF055475, AF055474, AF055473, U19147, U19146, U19145, U19144, U19143, U19142), any of the CTA class of receptors including in particular HOM-MEL-40 antigen encoded by the SSX2 gene (e.g., GenBank Acc. Nos. X86175, U90842, U90841, X86174), carcinoembyonic antigen (CEA, Gold and Freedman, 1985 J. Exp. Med. 121:439; see also e.g., GenBank Acc. Nos. SEG_HUMCEA, M59710, M59255, M29540), and PyLT (e.g., GenBank Acc. Nos. J02289, J02038).

[0100] A lymphocyte status indicator may also include one or more apoptosis signaling polypeptides, sequences of which are known to the art, as reviewed, for example, in When Cells Die: A Comprehensive Evaluation of Apoptosis and Programmed Cell Death (R. A. Lockshin et al., Eds., 1998 John Wiley & Sons, New York; see also, e.g., Green et al., 1998 Science 281:1309 and references cited therein; Ferreira et al., 2002 Clin. Canc. Res. 8:2024; Gurumurthy et al., 2001 Cancer Metastas. Rev. 20:225; Kanduc et al., 2002 Int. J. Oncol. 21:165). Typically, an apoptosis signaling polypeptide sequence comprises all or a portion of, or is derived from, a receptor death domain polypeptide, for instance, FADD (e.g., Genbank Acc. Nos. U24231, U43184, AF009616, AF009617, NM_{—}012115), TRADD (e.g., Genbank Acc. No. NM_{—}003789), RAIDD (e.g., Genbank Acc. No. U87229), CD95 (FAS/Apo-1; e.g., Genbank Acc. Nos. X89101, NM_{—}003824, AF344850, AF344856), TNF-α-receptor-1 (TNFR1, e.g., Genbank Acc. Nos. 563368, AF040257), DR5 (e.g., Genbank Acc. No. AF020501, AF016268, AF012535), an ITIM domain (e.g., Genbank Acc. Nos. AF081675, BC015731, NM_{—}006840, NM_{—}006844, NM_{—}006847, XM_{—}017977; see, e.g., Billadeau et al., 2002 J. Clin. Invest. 109:161), an ITAM domain (e.g., Genbank Acc. Nos. NM_{—}005843, NM_{—}003473, BC030586; see, e.g., Billadeau et al., 2002), or other apoptosis-associated receptor death domain polypeptides known to the art, for example, TNFR2 (e.g., Genbank Acc. No. L49431, L49432), caspase/procaspase-3 (e.g., Genbank Acc. No. XM_{—}54686), caspase/procaspase-8 (e.g., AF380342, NM_{—}004208, NM_{—}001228, NM_{—}033355, NM_{—}033356, NM_{—}033357, NM_{—}033358), caspase/procaspase-2 (e.g., Genbank Acc. No. AF314174, AF314175), etc. Cells in a biological sample that are suspected of undergoing apoptosis may be examined for morphological, permeability, biochemical, molecular genetic, or other changes that will be apparent to those familiar with the art.

[0101] These and related methods for the first time permit rapid determination of the rearranged DNA sequences that encode both chains of a TCR or IG heterodimer from a single cell. Such embodiments will find uses for diagnostic and prognostic purposes, by permitting high-throughput sequencing of adaptive immune receptor encoding sequences from each of a plurality of single cells, and will also usefully inform immunological investigations into TCR or IG heterodimeric pairings and their underlying molecular mechanisms. The rapid and large-scale availability of DNA sequence information for both subunits of a large number of TCR and/or IG heterodimers will accelerate development of synthetic antibody technologies and related arts, for example, where antibodies or complete or partial TCR or IG antigen-binding regions may be usefully engineered into diagnostic, therapeutic, biomimetic, enzymatic or catalytic (e.g., Abzymes) or other industrially useful compositions. By virtue of the quantitative nature of the high throughput TCR and/or IG sequencing afforded by the present disclosure, high precision in the quantitative characterization of TCR and/or IG heterodimer sequences that are present in a sample will advantageously improve the ability to determine the number of cells that belong to a specific T cell or B cell clone.

[0102] As noted above, according to these embodiments for identifying both chains of a TCR or IG heterodimer from a single adaptive immune cell, in any given second microdroplet, all oligonucleotide amplification primers will comprise the same barcode oligonucleotide, but within different second microdroplets the primer sets will comprise different barcode sequences. Accordingly, after sequencing the DNA library obtained as described above to obtain a data set of sequences, the sequences in the data set can be sorted into groups of sequences that have identical barcode sequences, and such barcode groups can be further sorted into those having X1 or X2 sequences (which include portions of V and J or C regions) that will indicate whether a given sequence reflects the amplification product of a first TCR or IG encoding chain (e.g., a TCRA or IGH chain) or a second TCR or IG encoding chain (e.g., a TCRB or IGL chain).

[0103] Sequences that have been so sorted by barcode and by TCR or IG chain may be further subject to cluster analysis using any of a known variety of algorithms for clustering (e.g., BLASTClust, UCLUST, CD-HIT, see also IEEE Rev Biomed Eng. 2010; 3:120-54. doi: 10.1109/RBME.2010.2083647; Clustering algorithms in biomedical research: a review, Xu R, Wunsch D C 2^{nd}; Mol. Biotechnol. 2005 September; 31(1):55-80; Data clustering in life sciences. Zhao Y, Karypis G; Methods Mol. Biol. 2010; 593:81-107. doi: 10.1007/978-1-60327-194-3_{—}5; Overview on techniques in cluster analysis. Frades I, Matthiesen R, and error correction in the case of sequences that fail to cluster with other sequences having shared barcode sequences but which instead would cluster with sequences having a barcode that differs by a single nucleotide. See, e.g., Proc Natl Acad Sci USA. 2012 Jan. 24; 109(4):1347-52. doi: 10.1073/pnas.1118018109. Epub 2012 Jan. 9. Digital RNA sequencing minimizes sequence-dependent bias and amplification noise with optimized single-molecule barcodes. Shiroguchi K, Jia T Z, Sims P A, Xie X S; Proc Natl Acad Sci USA. 2012 Sep. 4; 109(36):14508-13. doi: 10.1073/pnas.1208715109. Epub 2012 Aug. 1. Detection of ultra-rare mutations by next-generation sequencing. Schmitt M W, Kennedy S R, Salk J J, Fox E J, Hiatt J B, Loeb L A.

[0104] Accordingly, certain embodiments comprise a method including steps of (a) sorting the data set of sequences (obtained as described above) according to oligonucleotide barcode sequences identified therein to obtain a plurality of barcode sequence sets each having a unique barcode; (b) sorting each barcode sequence set of (a) into an X1 sequence-containing subset and an X2 sequence-containing subset; (c) clustering members of each of the X1 and X2 sequence-containing subsets according to X1 and X2 sequences to obtain one or a plurality of X1 sequence cluster sets and one or a plurality of X2 sequence cluster sets, respectively, and error-correcting single nucleotide barcode sequence mismatches within any one or more of said X1 and X2 sequence cluster sets; and (d) identifying as originating from the same cell sequences that are members of an X1 and an X2 sequence cluster set that belong to the same one or more barcode sequence sets.

[0105] It will be appreciated that according to non-limiting theory, first and second adaptive immune receptor chain encoding sequences that occur with the same set of barcode sequences have an extremely high probability of having originated from the same fused microdroplet, and thus from the same source cell. For example, where 10⁴ different barcodes are used in the construction of the first and second oligonucleotide amplification primers, the probability that two independent (i.e., originating from different cells) double-stranded first and second products would be obtained having the same barcode sequence is one in 10⁸. Hence, if according to the methods described herein, three or more copies of a given set of first and second adaptive immune receptor polypeptide encoding sequences (e.g., X1 and X2) share common barcode sequences (e.g., belong to the same barcode sequence set), the probability that the sequences are of independent cellular origin approaches zero.

[0106] Similarly, it will be appreciated that analysis of the data set of sequences obtained according to the present methods may also be used to characterize the biological status of the lymphoid cell source of genomic DNA. For example, because in B cells IGH gene rearrangement is known to precede IGL gene rearrangement, barcode sequence analysis as described herein may reveal multiple single lymphoid cell genomes having the same rearranged IGH sequence but different IGL sequences, indicating origins of these sequences in immunologically naïve cells.

[0107] Alternatively, the analysis may exploit the observation that T cells express proteins that are specific to their functions, such as lymphocyte status indicator molecules as described herein. For example, regulatory T cells express the protein FOXP3. If a cDNA that has been reverse transcribed from T cell mRNA is subsequently amplified, co-amplification products may include cDNA species that reflect other mRNAs encoding phenotypic specific proteins such as FOXP3, along with cDNAs encoding the TCRB and TCRA molecules. This approach may permit identification of the adaptive immune receptors that are expressed by T cells having specific phenotypes, such as T regulatory cells or effector T cells.

[0108] Thus, there is provided herein a method for determining rearranged DNA sequences encoding first and second polypeptide sequences of an adaptive immune receptor heterodimer in a single lymphoid cell, comprising (1) contacting (A) individual first microdroplets that each contain a single lymphoid cell or genomic DNA isolated therefrom, with (B) individual second microdroplets from a plurality of second liquid microdroplets that each contain (i) a first oligonucleotide amplification primer set that is capable of amplifying a rearranged DNA sequence encoding a first complementarity determining region-3 (CDR3) of a first polypeptide of an adaptive immune receptor heterodimer, and (ii) a second oligonucleotide amplification primer set that is capable of amplifying a rearranged DNA sequence encoding a second complementarity determining region-3 (CDR3) of a second polypeptide of the adaptive immune receptor heterodimer. The first oligonucleotide amplification primer set comprises a composition comprising a plurality of oligonucleotides having a plurality of oligonucleotide sequences of general formula: U1/2-B1-X1, in which U1/2 comprises an oligonucleotide which comprises a first universal adaptor oligonucleotide sequence when B1 is present or a second universal adaptor oligonucleotide sequence when B1 is nothing. In some embodiments, B1 comprises an oligonucleotide that comprises either nothing or a first oligonucleotide barcode sequence of 6, 7, 8, 9, 10, 11, 12, 13, 14, 15, 16, 17, 18, 19 or 20 contiguous nucleotides, and X1 comprises an oligonucleotide that is one of: (a) a polynucleotide comprising at least 20, 30, 40 or 50 and not more than 100, 90, 80, 70 or 60 contiguous nucleotides of an adaptive immune receptor variable (V) region encoding gene sequence for said first polypeptide of an adaptive immune receptor heterodimer, or the complement thereof, and in each of the plurality of oligonucleotide sequences of general formula U1/2-B1-X1, X1 comprises a unique oligonucleotide sequence, and (b) a polynucleotide comprising at least 15-30 or 31-50 and not more than 80, 70, 60 or 55 contiguous nucleotides of either (i) an adaptive immune receptor joining (J) region encoding gene sequence for said first polypeptide of an adaptive immune receptor heterodimer, or the complement thereof, or (ii) an adaptive immune receptor constant (C) region encoding gene sequence for said first polypeptide of an adaptive immune receptor heterodimer, or the complement thereof, and in each of the plurality of oligonucleotide sequences of general formula U1/2-B1-X1, X1 comprises a unique oligonucleotide sequence. The second oligonucleotide amplification primer set can comprise a composition comprising a plurality of oligonucleotides having a plurality of oligonucleotide sequences of general formula: U3/4-B2-X2 in which U3/4 comprises an oligonucleotide which comprises a third universal adaptor oligonucleotide sequence when B2 is present or a fourth universal adaptor oligonucleotide sequence when B2 is nothing, B2 comprises an oligonucleotide that comprises either nothing or a second oligonucleotide barcode sequence of 6, 7, 8, 9, 10, 11, 12, 13, 14, 15, 16, 17, 18, 19 or 20 contiguous nucleotides that is from the same as B1, and X2 comprises an oligonucleotide that is one of: (a) a polynucleotide comprising at least 20, 30, 40 or 50 and not more than 100, 90, 80, 70 or 60 contiguous nucleotides of an adaptive immune receptor variable (V) region encoding gene sequence for said second polypeptide of an adaptive immune receptor heterodimer, or the complement thereof, and in each of the plurality of oligonucleotide sequences of general formula U3/4-B2-X2, X2 comprises a unique oligonucleotide sequence, and (b) a polynucleotide comprising at least 15-30 or 31-50 and not more than 80, 70, 60 or 55 contiguous nucleotides of either (i) an adaptive immune receptor joining (J) region encoding gene sequence for said second polypeptide of an adaptive immune receptor heterodimer, or the complement thereof, or (ii) an adaptive immune receptor constant (C) region encoding gene sequence for said second polypeptide of an adaptive immune receptor heterodimer, or the complement thereof, and in each of the plurality of oligonucleotide sequences of general formula U3/4-B2-X2, X2 comprises a unique oligonucleotide sequence. The step of contacting can take place under conditions and for a time sufficient for a plurality of fusion events between one of the first microdroplets and one of the second microdroplets to produce a plurality of fused microdroplets in which nucleic acid amplification interactions occur between the genomic DNA and the first and second oligonucleotide amplification primer sets, to obtain in each of one or more of said plurality of fused microdroplets: a first double-stranded DNA product that comprises at least one first universal adaptor oligonucleotide sequence, at least one first oligonucleotide barcode sequence, at least one X1 oligonucleotide V region encoding gene sequence of said first polypeptide of the adaptive immune receptor heterodimer, at least one second universal adaptor oligonucleotide sequence, and at least one X1 oligonucleotide J region or C region encoding gene sequence of said first polypeptide of the adaptive immune receptor heterodimer. The conditions also permit obtaining in each of one or more of said plurality of fused microdroplets: a second double-stranded DNA product that comprises at least one third universal adaptor oligonucleotide sequence, at least one second oligonucleotide barcode sequence, at least one X2 oligonucleotide V region encoding gene sequence of said second polypeptide of the adaptive immune receptor heterodimer, at least one fourth universal adaptor oligonucleotide sequence, and at least one X2 oligonucleotide J region or C region encoding gene sequence of said second polypeptide of the adaptive immune receptor heterodimer.

[0109] The method also includes disrupting the plurality of fused microdroplets to obtain a heterogeneous mixture of said first and second double-stranded DNA products and contacting the mixture of first and second double-stranded DNA products with a third amplification primer set and a fourth amplification primer set. In some embodiments, the third amplification primer set comprises (i) a plurality of first sequencing platform tag-containing oligonucleotides that each comprise an oligonucleotide sequence that is capable of specifically hybridizing to the first universal adaptor oligonucleotide and a first sequencing platform-specific oligonucleotide sequence that is linked to and positioned 5′ to the first universal adaptor oligonucleotide sequence, and (ii) a plurality of second sequencing platform tag-containing oligonucleotides that each comprise an oligonucleotide sequence that is capable of specifically hybridizing to the second universal adaptor oligonucleotide sequence and a second sequencing platform-specific oligonucleotide sequence that is linked to and positioned 5′ to the second universal adaptor oligonucleotide sequence. In other embodiments, the fourth amplification primer set comprises (i) a plurality of third sequencing platform tag-containing oligonucleotides that each comprise an oligonucleotide sequence that is capable of specifically hybridizing to the third universal adaptor oligonucleotide and a third sequencing platform-specific oligonucleotide sequence that is linked to and positioned 5′ to the third universal adaptor oligonucleotide sequence, and (ii) a plurality of fourth sequencing platform tag-containing oligonucleotides that each comprise an oligonucleotide sequence that is capable of specifically hybridizing to the fourth universal adaptor oligonucleotide sequence and a fourth sequencing platform-specific oligonucleotide sequence that is linked to and positioned 5′ to the fourth universal adaptor oligonucleotide sequence. The contacting step can take place under conditions and for a time sufficient to amplify both strands of the first and second double-stranded DNA products of (2), to obtain a DNA library for sequencing. The method also includes sequencing the DNA library obtained in (3) to obtain a data set of sequences encoding the first and second polypeptide sequences of the adaptive immune receptor heterodimer.

[0110] FIG. 2 illustrates one method by which a plurality of first microdroplets 210 that contain a single lymphoid cell or genomic DNA fuse with a plurality of individual second microdroplets 220 to form a plurality of fused microdroplets 230. The second plurality of droplets may comprise amplification primer sets, as described herein, and the fused droplets can be placed under conditions where the amplification primers can amplify the DNA found in the single lymphoid cell or the genomic DNA (or cDNA) within the microdroplet.

[0111] These and related embodiments permit high throughput sequencing of rearranged genes encoding both chains from the same cell of an adaptive immune receptor heterodimer, such as IGH plus IGL, or IGH plus IGK, or TCRA plus TCRB, or TCRG plus TCRD. Advantageously, this approach also permits quantifying the number of cells having a given TCR or IG. A schematic depiction of an exemplary embodiment is shown in FIG. 3, according to which steps highly similar to those described above are carried out, significantly, however, with the step of contacting DNA from a single lymphoid cell with first and second amplification primer sets as described herein to effect the first amplification reaction by which the unique molecular-tagging barcode is incorporated taking place within a single microdroplet, such as those that are formed from emulsions for use in the RainDance™ microdroplet digital PCR system (RainDance Technologies, Lexington, Mass.) (e.g., Pekin et al., 2011 Lab. Chip 11(13):2156; Zhong et al., 2011 Lab. Chip 11(13):2167; Tewhey et al., 2009 Nature Biotechnol. 27:1025; 2010 Nature Biotechnol. 28:178) or other comparable systems, any of which may be adapted by the skilled person for use with the herein described compositions and methods. Subsequent to the incorporation into a plurality of distinct dsDNA products of the plurality of unique molecular-tagging barcodes, the microdroplets may be disrupted and the ensuing steps that include amplifying and introducing sequencing platform-specific oligonucleotides may be carried out as described herein and shown in FIG. 3.

[0112] In these and related embodiments, a single tagging barcode (BC1) may be shared by all J primers (or in certain embodiments by all V primers) and it may be desirable to produce such primers with a finite set of specific and pre-identified barcode sequences. Only a single tagging barcode sequence (BC1) will be present within any given microdroplet during the first step, however. Hence, even after a large and diverse set of sequence information is obtained following the sequencing step when practiced starting with a sample that comprises a plurality of heterogeneous lymphoid cells as provided herein, analysis of such information may include determination of first and second TCR or Ig heterodimeric polypeptide chain encoding sequences that contain the same tagging barcode (BC1), from which a probabilistic basis would indicate an extremely high likelihood that both chains are the products of the same cell. Accordingly, the present disclosure for the first time provides compositions and methods for determining and quantifying the relative representation in a sample of both chains of a TCR or Ig heterodimer that are expressed in the same cell.

[0113] Clonal Heterodimer Sequence Determination without MicroDroplets

[0114] According to certain other embodiments, determination of rearranged DNA sequences encoding first and second adaptive immune receptor heterodimer polypeptide sequences in a single cell may be achieved without first preparing separate populations of first and second microdroplets that contain, respectively, single lymphoid cell genomic DNA (or cDNA that has been reverse transcribed from mRNA therefrom) and oligonucleotide amplification primer sets.

[0115] Instead, these alternative embodiments contemplate separating the cells of a lymphoid cell-containing cell suspension (e.g., a blood cell preparation from a subject or a cell subpopulation thereof) into subpopulations by distributing the cells to a plurality of containers, such as multiple wells of a multi-well cell culture plate or assay plate (e.g., 96-, 384- or 1536-well formats). Persons familiar with the art will be aware of a number of devices and methodologies for distributing a cell suspension into such multiple containers, for instance, using fluorescence activated cell sorting (FACS) or with automated low-volume dispensing equipment or by limiting dilution, to obtain a desired number of cells per well, container, tube, compartment or the like. In certain embodiments it may be preferred to distribute substantially the same number of cells to each container, although certain other contemplated embodiments need not be so limited.

[0116] Briefly, according to these and related embodiments, separated lymphoid cell subpopulations may provide mRNA molecules that are used as templates for reverse transcription to produce cDNA molecules that are concomitantly labeled during the reverse transcription (RT) step (see FIGS. 4 and 5). FIG. 4 depicts a schematic representation of labeling adaptive immune receptor polypeptide encoding cDNA during reverse transcription by using an oligonucleotide reverse transcription primer that directs incorporation of oligonucleotide barcode and universal adaptor oligonucleotide sequences into cDNA. The cDNA strand is amplified with primers comprising a pGEX-Rev sequence, a barcode BC and N6 spacer sequence (BC-N6) and a “Cn-RC” sequence. The 3′ end of the amplified cDNA strand includes a pGEX-FRC sequence, a barcode BC-N6 spacer sequence, and a “Smarter UAll” sequence. The wells or containers of amplified cDNA are pooled, and SPRI bead purification is performed of the first cDNA strand pool. PCR amplification is performed using a tailing-pGEX F/R sequence. The amplicons are purified and selected based on size. The resulting cDNA amplicon is shown in FIG. 4.

[0117] FIG. 5 depicts a schematic representation of labeling adaptive immune receptor polypeptide encoding cDNA during reverse transcription by using an oligonucleotide reverse transcription primer that directs incorporation of oligonucleotide barcode and universal adaptor oligonucleotide sequences into cDNA. FIG. 6 presents a schematic representation of a DNA product that is amenable to sequencing following modification with Illumina sequencing adapters of amplified adaptive immune receptor polypeptide encoding cDNA that has been labeled during reverse transcription by using an oligonucleotide reverse transcription primer that directs incorporation of oligonucleotide barcode and universal adaptor oligonucleotide sequences.

[0118] As provided herein, oligonucleotide RT primers in such embodiments include oligonucleotide sequences that specifically hybridize to target adaptive immune receptor encoding regions such as V, J or C region sequences, and also include oligonucleotide barcode sequences as molecular labels, along with universal adaptor oligonucleotide sequences as described herein. The process of reverse transcription from adaptive immune receptor encoding mRNA may thus be accompanied by incorporation into cDNA products of (i) oligonucleotide barcode sequences as source identifiers, and (ii) universal adaptors to facilitate automated high throughput sequencing as described herein. By way of illustration and not limitation, in certain of these embodiments all RT primers in the oligonucleotide RT primer sets that are contacted with the contents of a single particular container (e.g., one well of a multi-well plate) share a common barcode oligonucleotide sequence (B), and a different barcode oligonucleotide sequence (B) is present in each separate container (such as each well of a multi-well plate).

[0119] For instance, a cell suspension (e.g., blood cells or a fraction thereof, such as nucleated cells, lymphoid cells, etc.) may be divided by random distribution among different wells of a multi-well plate to physically separate the cells into subsets. The subset of cells in each well may then be lysed or otherwise processed according to any of a number of conventional procedures to liberate mRNA present within the cells, which may include mRNA encoding both chains of TCR (e.g., TCRA and TCRB, or TCRG and TCRG) or IG (e.g., IGH and IGL) heterodimers expressed by the cells, and which may also include mRNA encoding one or more lymphocyte status indicator molecules.

[0120] The mRNA may then be used as a template for cDNA synthesis by modification of established reverse transcription (RT) protocols, using oligonucleotide reverse transcription primer sets as described herein that are capable of introducing into the cDNA products, in each separate well, a unique oligonucleotide barcode sequence that is linked to the TCR or IG encoding sequence or complement thereof (see, e.g., FIGS. 4-5). External to the barcode (e.g., distal from the TCR or IG encoding sequence, relative to the barcode), the oligonucleotide reverse transcription primer sets may also be designed to introduce a universal adaptor oligonucleotide sequence as described herein and/or other known oligonucleotide sequence features such as those that may facilitate downstream amplification, processing and/or other manipulation steps such as those that will be compatible with automated high throughput quantitative sequencing.

[0121] Following DNA amplification of the reverse transcription cDNA products, each amplified DNA molecule within a given well of the multi-well plate will have the same oligonucleotide barcode sequence, while the barcode sequences of the amplification products in each different well will be distinct from one another. In this manner within each well, all DNA molecules that encode either chain of an adaptive immune receptor heterodimer (e.g., IGH and IGL, TCRA and TCRB, TCRG and TCRD) will have the same oligonucleotide barcode sequence.

[0122] The amplification products may be pooled and quantitatively sequenced using automated high throughput DNA sequencing as described elsewhere herein to obtain a data set of sequences, which include TCR and/or IG sequences along with associated oligonucleotide barcode sequences. As disclosed herein, in certain preferred embodiments the data set of sequences may be analyzed by a combinatorics approach, which permits matching particular pairs of adaptive immune receptor heterodimer subunit encoding sequences to identify them as having originated from the same lymphoid cell.

[0123] As a non-limiting illustrative example, a hypothetical data set of sequences may be obtained from a set of 100 wells into which a lymphoid cell suspension is distributed. In each well, the cells' mRNA cDNA is reverse transcribed using first and second oligonucleotide reverse transcription primer sets that are specific, respectively, for portions of TCRA and TCRB encoding sequences. The oligonucleotide reverse transcription primer sets also introduce a different oligonucleotide barcode sequence into the cDNA products in each distinct well. If, hypothetically, T cells having a single, common clonal origin (e.g., T cells that express the identical TCRA/B sequences) are randomly distributed into five different wells of the 100 wells, then the sequence data set will include five separate instances in which the unique pair of TCRA and TCRB sequences occurs in DNA amplification products that share an identical barcode sequence. In other words, in each of the five separate wells, the oligonucleotide reverse transcription primer set promotes the generation of cDNAs having identical rearranged TCRA and TCRB sequences, but the cDNA products of each well include a distinct, well-specific barcode sequence. According to non-limiting theory, on a probabilistic basis the likelihood would be extremely high that the unique TCRA/TCRB sequence pair originates in the same T cell clone, members of which would have been randomly distributed into the five different wells.

[0124] According to certain embodiments, a more detailed description of this high throughput method for determining rearranged DNA sequences encoding first and second polypeptide sequences of an adaptive immune receptor heterodimer in a single lymphoid cell is as follows:

[0125] Lymphoid cells are isolated from an anti-coagulated whole blood sample using either density gradient centrifugation (e.g., FicollPaque®, GE Healthcare Bio-Sciences, Piscataway, N.J.), or by binding to antibody-coated magnetic beads, such as CD45 beads from Miltenyi Biotec (Auburn, Calif.). Alternatively, T lymphocytes may be purified from a whole blood sample by binding to CD3+ magnetic beads, and B lymphocytes may be purified from a whole blood sample by binding to CD19+ magnetic beads. Isolated cell populations may then be checked for viability. Dead cells may be removed from the sample with a filter, for example, using a Miltenyi Biotec Dead Cell Removal kit. Depending on the application, isolated viable lymphoid cells (e.g., as may be present in unsorted peripheral blood mononuclear cells (PBMC), or as preparations of specific cell sub-sets) may be cultured in short-tem cell culture, and in certain embodiments cells may be activated by any of a number of known activation paradigms, such as by exposure to one or more of cytokines, chemokines, specific antibodies, mitogens, polyclonal activators, etc. The final cell sample may be prepared by resuspending the cells in culture media (e.g., RPMI with 10% fetal bovine serum) or appropriate isotonic buffered solutions (e.g., phosphate buffered saline, PBS), supplemented with agents which prevent cell clumping (e.g., 0.1% BSA, 1% Pluronic® F-68). Alternatively, whole blood or PBMCs may be utilized without sorting. As the most general case, any set of cells present as a suspension in an aqueous solution that contains B or T cells may be used.

[0126] The cell preparation comprising a plurality of lymphoid cells is divided into a plurality of physically separated subsets, for example, by distributing the suspension of cells amongst a plurality of containers or compartments that are capable of containing the cells to obtain a plurality of containers or compartments that each contain a subpopulation of the lymphoid cells, wherein each subpopulation comprises one lymphoid cell or a plurality of lymphoid cells, and wherein each container or compartment is physically separate so that the contents are not in fluid communication with one another. Preferably the cells are distributed or divided into the plurality of containers so that each container contains a substantially equivalent number of cells, which may result in there being the same number of cells in each container, or in there being in each container a number of cells that is within 1, 2, 3, 4, 5, 6, 7, 8, 9, 10, 11, 12, 13, 14, 15, 16, 17, 18, 19, 20, 21-30, 31-50, 51-70, 71-80, or 81-100 percent of the number of cells in any other container. Exemplary containers may be wells of multi-well culture or assay plates such as 6-, 12-, 24-, 48-, 96-, 384- or 1536-well multi-well plates or any other multi-well plate format; arrays of tubes, filters, microfabricated well arrays, laser-generated matrices or any other suitable containers that are capable of containing the cells are also contemplated. In certain exemplary embodiments, cells may be distributed amongst the plurality of containers by fluorescence activated cell sorting (FACS): A predetermined number of cells may be isolated, sorted, and deposited into a multi-well (e.g., 96, 384 or 1536) reaction plate using FACS. Any of a number of methodologies and instrumentation may be employed using flow cytometers that are capable of preparative sorting of cells onto multi-well plates (e.g., Beckton Dickinson FACSAria® III, Beckman MoFlo™ XDP, etc.). FACS allows for specific subsets of cells to be isolated by antibody staining, viability staining or multicolor combination of specific cell staining reagents. Cell sorters may be employed to count target cells and deposit specified numbers of cells into each well of a collection multi-well plate (10-20% CV). Alternatively, automated low volume (nl to μl volumes per well) dispensers, capable of preferably non-contact dispensing of uniform cell suspensions onto high density micro-well plates (384, 1536, 3456 wells), such as Beckman Coulter BioRAPTR FRD™, LambdaJet™ IIIMT (Thermo Fisher Scientific), CyBi™ Drop (Jena Analytik), Furukawa Perflow™, or similar instruments, may be used to deposit specified numbers of cells into each well of a collection multi-well plate with high precision and reproducibility (10-20% CV).

[0127] The adaptive immune receptor encoding polynucleotide sequences are then amplified from each well, with a unique, well-specific, barcode oligonucleotide attached to all samples. One way to do this is to convert cellular mRNA to cDNA by reverse transcription, and to add to the cDNA products a molecular label in the form of an oligonucleotide barcode during the reverse transcription step. The same barcode may be added to cDNAs that are complementary to mRNAs encoding both chains of each heterodimeric adaptive immune receptor molecule within the well, for instance, the immunoglobulin heavy and light chains, the TCRA and TCRB chains, and the TCRG and TCRD chains. In this and related embodiments, antigen receptor encoding sequences are amplified from cDNA made by reverse transcription from mRNA; genomic DNA (gDNA) is not amplified. To do this, each well of a microwell plate may contain a medium containing an RNase inhibitor, and a medium designed either to protect RNA in cells (such as Qiagen RNAlater™, Qiagen, Valencia, Calif.), or to lyse cells and isolate RNA (Trizol, guanidium isothiocyanate—Qiagen RNeasy™ etc.). Extracted total cellular RNA may then be transferred into another multi-well plate for the reverse transcription reaction using robotic liquid handlers. Alternatively, sorted cells may be lysed directly in a reverse-transcription reaction mix containing an RNase inhibitor. Reverse transcription reaction (RT) may be initiated by exposing cellular RNA to a reaction mix containing an appropriate buffer, dNTPs, an enzyme (reverse transcriptase) and a set of oligonucleotide reverse transcription primers. These primers will generally comprise a multiplicity of subsets of primers that may anneal to IgG, IgM, IgA, IgD, IgE, Ig kappa, Ig lambda, TCR alpha, beta, gamma and delta constant region (C-segment) gene-specific oligonucleotide sequences, as well as a universal template switching oligonucleotide (e.g., Clontech Smarter™ UAII oligonucleotide, Clontech, Mountain View, Calif.). For instance, either the C-segment gene specific primers, or the Smarter™ UAII oligonucleotide, or both, will be uniquely tagged with a DNA barcode, which will be a unique sequence 6, 7, 8, 9, 10, 11, 12, 13, 14, 15, . . . etc. base pairs long. Each well of the RT reaction plate will contain the same multiplicity of primers, where each primer in the mix will be tagged with the same DNA barcode, but a different barcode will be used in each well. Thus, upon completion of the reverse transcription reaction, each first strand cDNA molecule in a given well will be barcoded with an identical DNA barcode sequence.

[0128] List of BCR/TCR C-segment primers for 1^{st} cDNA strand synthesis:

| | | SEQ ID |
|---|---|---|
| Name | Sequence | NO: |
| Ck | GATGAAGACAGATGGTGCAGC | 5579 |
| Cl-1 | GGCGGGAACAGAGTGAC | 5580 |
| Cl-2 | AGGGTGGGAACAGAGTGAC | 5581 |
| Cl-3 | GCTTGAAGCTCCTCAGAGG | 5582 |
| Cl-4 | GGCGGGAACAGAGTGAC | 5583 |
| IgA | AGGCTCAGCGGGAAGAC | 5584 |
| IgD | GAACACATCCGGAGCCTTG | 5585 |
| IgE | GGTGGCATTGGAGGGAATG | 5586 |
| IgG-1 | AAGACCGATGGGCCCTTG | 5587 |
| IgG-2 | CTCTCGGAGGTGCTCCTG | 5588 |
| IgM | AATTCTCACAGGAGACGAGGG | 5589 |
| TCRa | TGGTACACGGCAGGGTC | 5590 |
| TCRA_RACE_JB2 | AGTCTCTCAGCTGGTACACGGCAGGGTC | 5591 |
| | 5′-AGTCTCTCAGCTGGTACACGGCAGGGTC-3′ | 5591 |
| TCRA_50 | 5′- ACA GAC TTG TCA CTG GAT TTA | 5592 |
| | GAG TCT CTC AGC TGG TAC ACG GCA | |
| | GGG TC -3′ | |
| TCRB_50 | 5′- GAG ATC TCT GCT TCT GAT GGC | 5593 |
| | TCA AAC ACA GCG ACC TCG GGT GGG | |
| | AAC AC -3′ | |
| TCRb-1 | CAAACACAGCGACCTCGG | 5594 |
| TCRb-2 | ATGGCTCAAACACAGCGAC | 5595 |
| TRCd-1 | GATGGTTTGGTATGAGGCTGAC | 5596 |
| TCRd-2 | CCTTCACCAGACAAGCGAC | 5597 |
| TCRg-1 | GAAAAATAGTGGGCTTGGGGG | 5598 |
| | Primers from Bolotin et al., Eur. J. Immunol. 2012 | |
| TCRb_BC1R | CAGTATCTGGAGTCATTGA | 5599 |
| TCRb_BC2R | TGCTTCTGATGGCTCAAACAC | 5600 |
| | Primers from Glanville et al., PNAS 2011 | |
| IgM_RACE | 5′-GATGGAGTCGGGAAGGAAGTCCTGTGCGAG-3′ | 5601 |
| IgG_RACE | 5′-GGGAAGACSGATGGGCCCTTGGTGG-3′ | 5602 |
| IgA_RACE | 5′-CAGGCAKGCGAYGACCACGTTCCCATC-3′ | 5603 |
| Igκ_RACE | 5′-CATCAGATGGCGGGAAGATGAAGACAGATGGTGC-3′ | 5604 |
| Igλ_RACE | 5′-CCTCAGAGGAGGGTGGGAACAGAGTGAC-3′ | 5605 |
| TCRB_RACE | 5′-GCTCAAACACAGCGACCTCGGGTGGGAACAC-3′ | 5606 |
| | Clontech Smarter primers | |
| Smarter UAII | 5′-AAGCAGTGGTATCAACGCAGAGTACrGrGrGrGrG-P-3 | 5607 |
| Islam UAII | 5′-AAGCAGTGGTATCAACGCAGAGTGCAGUGCUXXXXXXr | 5608 |
| | GrGrG-3′ | |
| Smarter CDS | 5′-Bio-AAGCAGTGGTATCAACGCAGAGTACT(30)N-1N-3′ | 5609 |
| Smarter IS PCR | 5′-Bio-AAGCAGTGGTATCAACGCAGAGT-3′ | 5610 |
| 5′RACE long | 5′-CTAATACGACTCACTATAGGGCAAGCAGTGGTATCAAC | 5611 |
| | GCAGAGT-3′ | |
| 5′RACE short | 5′-CTAATACGACTCACTATAGGGC-3′ | 5612 |

[0129] Accordingly, following the step of distributing cells to a plurality of containers, each of the containers is contacted, under conditions and for a time sufficient to promote reverse transcription of mRNA in the lymphoid cells in the plurality of containers, with a first and a second oligonucleotide reverse transcription primer set, wherein (A) the first oligonucleotide reverse transcription primer set is capable of reverse transcribing a plurality of first mRNA sequences encoding a plurality of first polypeptides of an adaptive immune receptor heterodimer, and (B) the second oligonucleotide reverse transcription primer set is capable of reverse transcribing a plurality of second mRNA sequences encoding a plurality of second polypeptides of the adaptive immune receptor heterodimer, and wherein: (I) the first oligonucleotide reverse transcription primer set comprises a composition comprising a plurality of oligonucleotides having a plurality of oligonucleotide sequences of general formula:

[0130] U1/2-B1-X1

[0131] in which U1/2 comprises an oligonucleotide which comprises a first universal adaptor oligonucleotide sequence when B1 is present or a second universal adaptor oligonucleotide sequence when B1 is nothing, B1 comprises an oligonucleotide that comprises either nothing or a first oligonucleotide barcode sequence of 6, 7, 8, 9, 10, 11, 12, 13, 14, 15, 16, 17, 18, 19 or 20 contiguous nucleotides, and X1 comprises an oligonucleotide that is one of: (a) a polynucleotide comprising at least 20, 30, 40 or 50 and not more than 100, 90, 80, 70 or 60 contiguous nucleotides of an adaptive immune receptor variable (V) region encoding gene sequence for said first polypeptide of an adaptive immune receptor heterodimer, or the complement thereof, and in each of the plurality of oligonucleotide sequences of general formula U1/2-B1-X1, X1 comprises a unique oligonucleotide sequence, and (b) a polynucleotide comprising at least 15-30 or 31-50 and not more than 80, 70, 60 or 55 contiguous nucleotides of either (i) an adaptive immune receptor joining (J) region encoding gene sequence for said first polypeptide of an adaptive immune receptor heterodimer, or the complement thereof, or (ii) an adaptive immune receptor constant (C) region encoding gene sequence for said first polypeptide of an adaptive immune receptor heterodimer, or the complement thereof, and in each of the plurality of oligonucleotide sequences of general formula U1/2-B1-X1, X1 comprises a unique oligonucleotide sequence, and (II) the second oligonucleotide reverse transcription primer set comprises a composition comprising a plurality of oligonucleotides having a plurality of oligonucleotide sequences of general formula:

[0132] U3/4-B2-X2

[0133] in which U3/4 comprises an oligonucleotide which comprises a third universal adaptor oligonucleotide sequence when B2 is present or a fourth universal adaptor oligonucleotide sequence when B2 is nothing, B2 comprises an oligonucleotide that comprises either nothing or a second oligonucleotide barcode sequence of 6, 7, 8, 9, 10, 11, 12, 13, 14, 15, 16, 17, 18, 19 or 20 contiguous nucleotides that is, for each of the first and second reverse transcription primer sets that are contacted with a single one of the plurality of containers, the same as B1, and X2 comprises an oligonucleotide that is one of: (a) a polynucleotide comprising at least 20, 30, 40 or 50 and not more than 100, 90, 80, 70 or 60 contiguous nucleotides of an adaptive immune receptor variable (V) region encoding gene sequence for said second polypeptide of an adaptive immune receptor heterodimer, or the complement thereof, and in each of the plurality of oligonucleotide sequences of general formula U3/4-B2-X2, X2 comprises a unique oligonucleotide sequence, and (b) a polynucleotide comprising at least 15-30 or 31-50 and not more than 80, 70, 60 or 55 contiguous nucleotides of either (i) an adaptive immune receptor joining (J) region encoding gene sequence for said second polypeptide of an adaptive immune receptor heterodimer, or the complement thereof, or (ii) an adaptive immune receptor constant (C) region encoding gene sequence for said second polypeptide of an adaptive immune receptor heterodimer, or the complement thereof, and in each of the plurality of oligonucleotide sequences of general formula U3/4-B2-X2, X2 comprises a unique oligonucleotide sequence, said step of contacting taking place under conditions and for a time sufficient to obtain in each of one or more of said plurality of containers: a first reverse-transcribed complementary DNA (cDNA) product that comprises at least one first universal adaptor oligonucleotide sequence, at least one first oligonucleotide barcode sequence, at least one X1 oligonucleotide V region encoding gene sequence of said first polypeptide of the adaptive immune receptor heterodimer, at least one second universal adaptor oligonucleotide sequence, and at least one X1 oligonucleotide J region or C region encoding gene sequence of said first polypeptide of the adaptive immune receptor heterodimer, and also to obtain in each of one or more of said plurality of containers: a second reverse-transcribed cDNA product that comprises at least one third universal adaptor oligonucleotide sequence, at least one second oligonucleotide barcode sequence, at least one X2 oligonucleotide V region encoding gene sequence of said second polypeptide of the adaptive immune receptor heterodimer, at least one fourth universal adaptor oligonucleotide sequence, and at least one X2 oligonucleotide J region or C region encoding gene sequence of said second polypeptide of the adaptive immune receptor heterodimer.

[0134] After the step of contacting, there is performed a step of combining the first and second reverse-transcribed cDNA products from the plurality of containers to obtain a mixture of reverse-transcribed cDNA products.

[0135] The combining step is followed by contacting the mixture of first and second reverse-transcribed cDNA products with a first oligonucleotide amplification primer set and a second oligonucleotide amplification primer set, wherein the first amplification primer set comprises (i) a plurality of first sequencing platform tag-containing oligonucleotides that each comprise an oligonucleotide sequence that is capable of specifically hybridizing to the first universal adaptor oligonucleotide and a first sequencing platform-specific oligonucleotide sequence that is linked to and positioned 5′ to the first universal adaptor oligonucleotide sequence, and (ii) a plurality of second sequencing platform tag-containing oligonucleotides that each comprise an oligonucleotide sequence that is capable of specifically hybridizing to the second universal adaptor oligonucleotide sequence and a second sequencing platform-specific oligonucleotide sequence that is linked to and positioned 5′ to the second universal adaptor oligonucleotide sequence, and wherein the second oligonucleotide amplification primer set comprises (i) a plurality of third sequencing platform tag-containing oligonucleotides that each comprise an oligonucleotide sequence that is capable of specifically hybridizing to the third universal adaptor oligonucleotide and a third sequencing platform-specific oligonucleotide sequence that is linked to and positioned 5′ to the third universal adaptor oligonucleotide sequence, and (ii) a plurality of fourth sequencing platform tag-containing oligonucleotides that each comprise an oligonucleotide sequence that is capable of specifically hybridizing to the fourth universal adaptor oligonucleotide sequence and a fourth sequencing platform-specific oligonucleotide sequence that is linked to and positioned 5′ to the fourth universal adaptor oligonucleotide sequence, said step of contacting taking place under conditions and for a time sufficient to amplify both of the first and second reverse-transcribed cDNA products, to obtain a DNA library for sequencing.

[0136] Once the DNA library for sequencing has been so obtained, in a step which follows there takes place the sequencing of the DNA library, to obtain a data set of sequences encoding the first and second polypeptide sequences of the adaptive immune receptor heterodimer.

[0137] Analysis of the data set of sequences may then proceed essentially as described elsewhere herein, to determine rearranged DNA sequences encoding first and second polypeptides of an adaptive immune receptor heterodimer that originate in a single (i.e., the same) lymphoid cell. Briefly, the method may further comprise the steps of: (a) sorting the data set of sequences according to oligonucleotide barcode sequences identified therein to obtain a plurality of barcode sequence sets each having a unique barcode; (b) sorting each barcode sequence set of (a) into an X1 sequence-containing subset and an X2 sequence-containing subset; (c) clustering members of each of the X1 and X2 sequence-containing subsets according to X1 and X2 sequences to obtain one or a plurality of X1 sequence cluster sets and one or a plurality of X2 sequence cluster sets, respectively, and error-correcting single nucleotide barcode sequence mismatches within any one or more of said X1 and X2 sequence cluster sets; (d) identifying each first and second adaptive immune receptor heterodimer polypeptide encoding sequence based on known X1 and X2 sequences, wherein each X1 sequence and each X2 sequence is associated with one or a plurality of unique B sequences to identify the container from which each B sequence-associated X1 sequence and each B sequence-associated X2 sequence originated; and (e) combinatorically matching B sequence-associated X1 and X2 sequences of (d) as being of common clonal origin based on a probability of B sequences that are coincident with common first and second adaptive immune receptor heterodimer polypeptide encoding sequences, and therefrom determining that rearranged DNA sequences encoding first and second polypeptide sequences of the adaptive immune receptor heterodimer originated in a single lymphoid cell.

[0138] Accordingly and in summary, in certain of the herein disclosed embodiments, sequencing adapters may be put onto each end of all reverse transcribed/amplified TCR and/or IG encoding segments, for instance, by synthesizing universal adaptor sequences onto each end of each cDNA molecule outside of the well-specific barcode. Then, the adapters can be synthesized onto each molecule in a tailing PCR reaction. In such embodiments, fusion RT primers may be synthesized and used for the first cDNA strand synthesis. These primers will all contain the same unique DNA barcode, as well as universal (e.g., pGEX) priming sites. Upon completion of the first cDNA strand synthesis by reverse transcription, the contents of all plate wells will be recovered in a quantitative manner and pooled (e.g., by an inverted centrifugation onto a trough), purified and consequently split into a multiplicity of wells for PCR with universal adapter primers (pGEX) containing “tail” sequences designed to incorporate sequences to be used for amplification and sequencing using a next-generation sequence analysis system (e.g., Illumina, San Diego, Calif.). Alternatively, the sequencing platform specific adapters can be ligated onto the ends of tagged molecules (e.g., Illumina TrueSeq™ sample preparation method). The molecules from all the wells are pooled thus generating a high-complexity sequencing library of uniquely tagged BCR or TCR ds-cDNA products. The molecules are all sequenced using high-throughput sequencing.

[0139] Universal sequencing primers, complementary to the sequencing platform-specific adapters may desirably be used. This will allow sample indexing of multiple samples, where a sample specific index will be used for each pool of uniquely tagged IGH/TCR products, originating from 96, 384, 1536 etc. original RT reaction wells. Or, a multiplex PCR with a mix of a universal UAII-Forward/multiplex V, J or C reverse primers may be used to amplify specific target fragments while preserving the original cell transcripts barcoding. If the Illumina sequencing platform (MiSeq™) is used, a paired end sequencing of 2×250 bp would span the majority of the whole BCR/TCR heavy and light (alpha/beta; gamma/delta) chain sequences, thus allowing recovery of the whole coding sequence of each receptor domain. Alternatively, sequencing platforms with extended read length (Roche 454, Life Ion Torrent, OGT etc.) may be used to read through all library fragments in a single sequencing read in one direction. After sequencing, the reads from each sample may be demultiplexed, provided that more than one sample were in the same sequencing lane. Demultiplexing may be performed by assigning sequencing reads to one of multiple indexes used as part of the universal sequencing adapters. For each sample demultiplexed sequence reads, all reads may be divided by the well specific barcodes. Each set of reads with a specific barcode may be clustered separately to correct PCR and sequencing errors and determine the unique sequences for each barcode:

[0140] Sequences that have been so sorted by barcode and by TCR or IG chain may be further subject to cluster analysis using any of a known variety of algorithms for clustering (e.g., BLASTClust, UCLUST, CD-HIT) and error correction in the case of sequences that fail to cluster with other sequences having shared barcode sequences but which instead would cluster with sequences having a barcode that differs by a single nucleotide. The unique sequences can be identified as IG heavy or light (kappa or lambda) chain, or as TCR (alpha or beta; gamma or delta) chains, by sequence match to known receptor sequences. Each heavy and light chain sequence may thus be associated with a list of barcodes corresponding to an original sample well position. The data can then be reordered by sequence. Associated to each unique sequence will be the set of multi-well plate well-specific barcodes within which set that sequence is found. For every B or T cell clone, the heavy and light chain sequences may be associated with the barcodes from all the wells for which one or more copies of the clone is present. Combinatorics may then be used to match heavy and light chains from the same clone. For example, in a 96 well plate, if particular heavy and light chain sequences are both associated with the same 12 barcodes, this particular pair of heavy and light chains may be assumed to have originated from the same clone, insofar as the probability of two sequences randomly having the exact same 12 barcodes out of 96 is infinitesimally small.

[0141] Exemplary Algorithm: It will be appreciated that according to non-limiting theory, first and second adaptive immune receptor chain encoding sequences that occur with the same set of barcode sequences have a high probability of having originated from the same plate well, and thus from the same source cell. For example, where 10³ different barcodes are used in the construction of the first and second oligonucleotide reverse transcription primer sets, the probability that two independent (i.e., originating from different cells) double-stranded cDNA first and second products would be obtained having the same barcode sequence is one in 10⁶, if one cell per each plate well were sorted.

[0142] Hence, if according to the methods described herein, three or more copies of a given set of first and second adaptive immune receptor polypeptide encoding sequences (e.g., X1 and X2) share common barcode sequences (e.g., belong to the same barcode sequence set), the probability that the sequences are of independent cellular origin approaches zero.

[0143] In certain embodiments barcode oligonucleotides B (B1, B2) may optionally comprise a first and a second oligonucleotide barcode sequence, wherein the first barcode sequence is selected to identify uniquely a particular V oligonucleotide sequence and the second barcode sequence is selected to identify uniquely a particular J oligonucleotide sequence. The relative positioning of the barcode oligonucleotides B1 and B2 and universal adaptors (U) advantageously permits rapid identification and quantification of the amplification products of a given unique template oligonucleotide by short sequence reads and paired-end sequencing on automated DNA sequencers (e.g., Illumina HiSeg™ or Illumina MiSEQ®, or GeneAnalyzer™-2, Illumina Corp., San Diego, Calif.). In particular, these and related embodiments permit rapid high-throughput determination of specific combinations of a V and a J sequence that are present in an amplification product, thereby to characterize the relative representation of annealing targets for each combination of a V-specific primer and a J-specific primer that may be present in a sample such as a sample comprising rearranged TCR or BCR encoding DNA. Verification of the identities and/or quantities of the amplification products may be accomplished by longer sequence reads.

[0144] A large number of adaptive immune receptor variable (V) region and joining (J) region gene sequences are known as nucleotide and/or amino acid sequences, including non-rearranged genomic DNA sequences of TCR and Ig loci, and productively rearranged DNA sequences at such loci and their encoded products. See, e.g., U.S. Ser. No. 13/217,126; U.S. Ser. No. 12/794,507; PCT/US2011/026373; PCT/US2011/049012. These and other sequences known to the art may be used according to the present disclosure for the design and production of oligonucleotides to be included in the presently provided compositions and methods.

[0145] V region-specific oligonucleotides may include a polynucleotide sequence of at least 20, 30, 40, 50, 60, 70, 80, 90, 100, 110, 120, 130, 140, 150, 160, 170, 180, 190, 200, 210, 220, 230, 240, 250, 260, 270, 280, 290, 300, 310, 320, 330, 340, 350, 360, 370, 380, 390, 400 or 450 and not more than 1000, 900, 800, 700, 600 or 500 contiguous nucleotides of an adaptive immune receptor (e.g., TCR or BCR) variable (V) region gene sequence, or the complement thereof, and in each of the plurality of oligonucleotide sequences V comprises a unique oligonucleotide sequence. Genomic sequences for TCR and BCR V region genes of humans and other species are known and available from public databases such as Genbank; V region gene sequences include polynucleotide sequences that encode the products of expressed, rearranged TCR and BCR genes and also include polynucleotide sequences of pseudogenes that have been identified in the V region loci. The diverse V polynucleotide sequences that may be incorporated into the presently disclosed oligonucleotides may vary widely in length, in nucleotide composition (e.g., GC content), and in actual linear polynucleotide sequence, and are known, for example, to include “hot spots” or hypervariable regions that exhibit particular sequence diversity.

[0146] The polynucleotide V may thus includes sequences to which members of oligonucleotide primer sets specific for TCR or BCR genes can specifically anneal. Primer sets that are capable of amplifying rearranged DNA encoding a plurality of TCR or BCR are described, for example, in U.S. Ser. No. 13/217,126; U.S. Ser. No. 12/794,507; PCT/US2011/026373; or PCT/US2011/049012; or the like; or as described therein may be designed to include oligonucleotide sequences that can specifically hybridize to each unique V gene and to each J gene in a particular TCR or BCR gene locus (e.g., TCRA, TCRB, TCRG, TCRD, IGH, IGK or IGL). For example by way of illustration and not limitation, an oligonucleotide primer of an oligonucleotide primer amplification set that is capable of amplifying rearranged DNA encoding one or a plurality of TCR or BCR may typically include a nucleotide sequence of 15, 16, 17, 18, 19, 20, 21, 22, 23, 24, 25, 26, 27, 28, 29, 30, 31, 32, 33, 34, 35, 36, 37, 38, 39 or 40 contiguous nucleotides, or more, and may specifically anneal to a complementary sequence of 15, 16, 17, 18, 19, 20, 21, 22, 23, 24, 25, 26, 27, 28, 29, 30, 31, 32, 33, 34, 35, 36, 37, 38, 39 or 40 contiguous nucleotides of a V or a J polynucleotide as provided herein. In certain embodiments the primers may comprise at least 19, 20, 21, 22, 23, 24, 25, 26, 27, 28, 29 or 30 nucleotides, and in certain embodiment the primers may comprise sequences of no more than 15, 16, 17, 18, 19, 20, 21, 22, 23, 24, 25, 26, 27, 28, 29, 30, 31, 32, 33, 34, 35, 36, 37, 38, 39 or 40 contiguous nucleotides. Primers and primer annealing sites of other lengths are also expressly contemplated, as disclosed herein.

[0147] The V polynucleotide may thus, in certain embodiments, comprise a nucleotide sequence having a length that is less than, the same or similar to that of the length of a typical V gene from its start codon to its CDR3 encoding region and may, but need not, include a nucleotide sequence that encodes the CDR3 region. In certain preferred embodiments the V polynucleotide includes all or a portion of a CDR3 encoding nucleotide sequence or the complement thereto and CDR3 sequence lengths may vary considerably and have been characterized by several different numbering schemes (e.g., Lefranc, 1999 The Immunologist 7:132; Kabat et al., 1991 In: Sequences of Proteins of Immunological Interest, NIH Publication 91-3242; Chothia et al., 1987 J. Mol. Biol. 196:901; Chothia et al., 1989 Nature 342:877; Al-Lazikani et al., 1997 J. Mol. Biol. 273:927; see also, e.g., Rock et al., 1994 J. Exp. Med. 179:323; Saada et al., 2007 Immunol. Cell Biol. 85:323).

[0148] Briefly, the CDR3 region typically spans the polypeptide portion extending from a highly conserved cysteine residue (encoded by the trinucleotide codon TGY; Y=T or C) in the V segment to a highly conserved phenylalanine residue (encoded by TTY) in the J segment of TCRs, or to a highly conserved tryptophan (encoded by TGG) in IGH. More than 90% of natural, productive rearrangements in the TCRB locus have a CDR3 encoding length by this criterion of between 24 and 54 nucleotides, corresponding to between 9 and 17 encoded amino acids. The numbering schemes for CDR3 encoding regions described above denote the positions of the conserved cysteine, phenylalanine and tryptophan codons, and these numbering schemes may also be applied to pseudogenes in which one or more codons encoding these conserved amino acids may have been replaced with a codon encoding a different amino acid. For pseudogenes which do not use these conserved amino acids, the CDR3 length may be defined relative to the corresponding position at which the conserved residue would have been observed absent the substitution, according to one of the established CDR3 sequence position numbering schemes referenced above.

[0149] The polynucleotide J may comprise a polynucleotide comprising at least 15-30, 31-50, 51-60, 61-90, 91-120, or 120-150, and not more than 600, 500, 400, 300 or 200 contiguous nucleotides of an adaptive immune receptor joining (J) region encoding gene sequence, or the complement thereof, and in each of the plurality of oligonucleotide sequences J comprises a unique oligonucleotide sequence. The polynucleotide J (or its complement) includes sequences to which members of oligonucleotide primer sets specific for TCR or BCR genes can specifically anneal. Primer sets that are capable of amplifying rearranged DNA encoding a plurality of TCR or BCR are described, for example, in U.S. Ser. No. 13/217,126; U.S. Ser. No. 12/794,507; PCT/US2011/026373; or PCT/US2011/049012; or the like; or as described therein may be designed to include oligonucleotide sequences that can specifically hybridize to each unique V gene and to each unique J gene in a particular TCR or BCR gene locus (e.g., TCR α, β, γ or δ, or IgH μ, γ, δ, α or ε, or IgL κ or λ).

[0150] It may be preferred in certain embodiments that the plurality of J polynucleotides that are present in the herein described primer compositions have lengths that simulate the overall lengths of known, naturally occurring J gene nucleotide sequences. The J region lengths in the herein described templates may differ from the lengths of naturally occurring J gene sequences by no more than 1, 2, 3, 4, 5, 6, 7, 8, 9, 10, 11, 12, 13, 14, 15, 16, 17, 18, 19 or 20 percent. The J polynucleotide may thus, in certain embodiments, comprise a nucleotide sequence having a length that is the same or similar to that of the length of a typical naturally occurring J gene and may, but need not, include a nucleotide sequence that encodes the CDR3 region, as discussed above.

[0151] Genomic sequences for TCR and BCR J region genes of humans and other species are known and available from public databases such as Genbank; J region gene sequences include polynucleotide sequences that encode the products of expressed and unexpressed rearranged TCR and BCR genes. The diverse J polynucleotide sequences that may be incorporated into the presently disclosed primers may vary widely in length, in nucleotide composition (e.g., GC content), and in actual linear polynucleotide sequence.

[0152] Alternatives to the V and J sequences described herein, for use in construction of the herein described V-segment and J-segment oligonucleotide primers, may be selected by a skilled person based on the present disclosure using knowledge in the art regarding published gene sequences for the V- and J-encoding regions of the genes for each TCR and Ig subunit. Reference Genbank entries for human adaptive immune receptor sequences include: TCRa: (TCRA/D): NC_{—}000014.8 (chr14:22090057.23021075); TCRβ: (TCRB): NC_{—}000007.13 (chr7:141998851.142510972); TCR₇: (TCRG): NC_{—}000007.13 (chr7:38279625.38407656); immunoglobulin heavy chain, IgH (IGH): NC_{—}000014.8 (chr14: 106032614.107288051); immunoglobulin light chain-kappa, IgLκ (IGK): NC_{—}000002.11 (chr2: 89156874.90274235); and immunoglobulin light chain-lambda, IgLλ (IGL): NC_{—}000022.10 (chr22: 22380474.23265085). Reference Genbank entries for mouse adaptive immune receptor loci sequences include: TCRβ: (TCRB): NC_{—}000072.5 (chr6: 40841295.41508370), and

[0153] immunoglobulin heavy chain, IgH (IGH): NC_{—}000078.5 (chr12:114496979.117248165).

[0154] Primer design analyses and target site selection considerations can be performed, for example, using the OLIGO primer analysis software and/or the BLASTN 2.0.5 algorithm software (Altschul et al., Nucleic Acids Res. 1997, 25(17):3389-402), or other similar programs available in the art.

[0155] Accordingly, based on the present disclosure and in view of these known adaptive immune receptor gene sequences and oligonucleotide design methodologies, for inclusion in the instant oligonucleotides those skilled in the art can design a plurality of V region-specific and J region-specific polynucleotide sequences that each independently contain oligonucleotide sequences that are unique to a given V and J gene, respectively. Similarly, from the present disclosure and in view of known adaptive immune receptor sequences, those skilled in the art can also design a primer set comprising a plurality of V region-specific and J region-specific oligonucleotide primers that are each independently capable of annealing to a specific sequence that is unique to a given V and J gene, respectively, whereby the plurality of primers is capable of amplifying substantially all V genes and substantially all J genes in a given adaptive immune receptor-encoding locus (e.g., a human TCR or IGH locus). Such primer sets permit generation, in multiplexed (e.g., using multiple forward and reverse primer pairs) PCR, of amplification products that have a first end that is encoded by a rearranged V region-encoding gene segment and a second end that is encoded by a J region-encoding gene segment.

[0156] Typically and in certain embodiments, such amplification products may include a CDR3-encoding sequence although the invention is not intended to be so limited and contemplates amplification products that do not include a CDR3-encoding sequence. The primers may be preferably designed to yield amplification products having sufficient portions of V and J sequences and in certain preferred embodiments also of barcode (B) sequences as described herein, such that by sequencing the products (amplicons), it is possible to identify on the basis of sequences that are unique to each gene segment (i) the particular V gene, and (ii) the particular J gene in the proximity of which the V gene underwent rearrangement to yield a rearranged adaptive immune receptor-encoding gene. Typically, and in preferred embodiments, the PCR amplification products will not be more than 600 base pairs in size, which according to non-limiting theory will exclude amplification products from non-rearranged adaptive immune receptor genes. In certain other preferred embodiments the amplification products will not be more than 500, 400, 300, 250, 200, 150, 125, 100, 90, 80, 70, 60, 50, 40, 30 or 20 base pairs in size, such as may advantageously provide rapid, high-throughput quantification of sequence-distinct amplicons by short sequence reads.

### Primers

[0157] According to the present disclosure, oligonucleotide primers are provided in an oligonucleotide primer set that comprises a plurality of V-segment primers and a plurality of J-segment primers, where the primer set is capable of amplifying rearranged DNA encoding adaptive immune receptors in a biological sample that comprises lymphoid cell DNA. Suitable primer sets are known in the art and disclosed herein, for example, the primer sets in US 2012/0058902, U.S. Ser. No. 13/217,126; U.S. Ser. No. 12/794,507; PCT/US2011/026373; or PCT/US2011/049012; or the like; or those shown in Table 1. In certain embodiments the primer set is designed to include a plurality of V sequence-specific primers that includes, for each unique V region gene (including pseudogenes) in a sample, at least one primer that can specifically anneal to a unique V region sequence; and for each unique J region gene in the sample, at least one primer that can specifically anneal to a unique J region sequence.

[0158] Primer design may be achieved by routine methodologies in view of known TCR and BCR genomic sequences. Accordingly, the primer set is preferably capable of amplifying every possible V-J combination that may result from DNA rearrangements in the TCR or BCR locus. As also described below, certain embodiments contemplate primer sets in which one or more V primers may be capable of specifically annealing to a “unique” sequence that may be shared by two or more V regions but that is not common to all V regions, and/or in which in which one or more J primers may be capable of specifically annealing to a “unique” sequence that may be shared by two or more J regions but that is not common to all J regions.

[0159] In particular embodiments, oligonucleotide primers for use in the compositions and methods described herein may comprise or consist of a nucleic acid of at least about 15 nucleotides long that has the same sequence as, or is complementary to, a 15 nucleotide long contiguous sequence of the target V- or J-segment (i.e., portion of genomic polynucleotide encoding a V-region or J-region polypeptide). Longer primers, e.g., those of about 16, 17, 18, 19, 20, 21, 22, 23, 24, 25, 26, 27, 28, 29, 30, 31, 32, 33, 34, 35, 36, 37, 38, 39, 40, 45, or 50, nucleotides long that have the same sequence as, or sequence complementary to, a contiguous sequence of the target V- or J-region encoding polynucleotide segment, will also be of use in certain embodiments. All intermediate lengths of the presently described oligonucleotide primers are contemplated for use herein. As would be recognized by the skilled person, the primers may have additional sequence added (e.g., nucleotides that may not be the same as or complementary to the target V- or J-region encoding polynucleotide segment), such as restriction enzyme recognition sites, adaptor sequences for sequencing, barcode sequences, and the like (see e.g., primer sequences provided in the Tables and sequence listing herein). Therefore, the length of the primers may be longer, such as about 55, 56, 57, 58, 59, 60, 61, 62, 63, 64, 65, 66, 67, 68, 69, 70, 71, 72, 73, 74, 75, 80, 85, 90, 95, 100 or more nucleotides in length or more, depending on the specific use or need.

[0160] Also contemplated for use in certain embodiments are adaptive immune receptor V-segment or J-segment oligonucleotide primer variants that may share a high degree of sequence identity to the oligonucleotide primers for which nucleotide sequences are presented herein, including those set forth in the Sequence Listing. Thus, in these and related embodiments, adaptive immune receptor V-segment or J-segment oligonucleotide primer variants may have substantial identity to the adaptive immune receptor V-segment or J-segment oligonucleotide primer sequences disclosed herein, for example, such oligonucleotide primer variants may comprise at least 70% sequence identity, preferably at least 75%, 80%, 85%, 90%, 91%, 92%, 93%, 94%, 95%, 96%, 97%, 98%, or 99% or higher sequence identity compared to a reference polynucleotide sequence such as the oligonucleotide primer sequences disclosed herein, using the methods described herein (e.g., BLAST analysis using standard parameters). One skilled in this art will recognize that these values can be appropriately adjusted to determine corresponding ability of an oligonucleotide primer variant to anneal to an adaptive immune receptor segment-encoding polynucleotide by taking into account codon degeneracy, reading frame positioning and the like.

[0161] Typically, oligonucleotide primer variants will contain one or more substitutions, additions, deletions and/or insertions, preferably such that the annealing ability of the variant oligonucleotide is not substantially diminished relative to that of an adaptive immune receptor V-segment or J-segment oligonucleotide primer sequence that is specifically set forth herein.

[0162] Table 2 presents as a non-limiting example an oligonucleotide primer set that is capable of amplifying productively rearranged DNA encoding TCR β-chains (TCRB) in a biological sample that comprises DNA from lymphoid cells of a subject. In this primer set the J segment primers share substantial sequence homology, and therefore may cross-prime amongst more than one target J polynucleotide sequence, but the V segment primers are designed to anneal specifically to target sequences within the CDR2 region of V and are therefore unique to each V segment. An exception, however, is present in the case of several V primers where the within-family sequences of the closely related target genes are identical (e.g., V6-2 and V6-3 are identical at the nucleotide level throughout the coding sequence of the V segment, and therefore may have a single primer, TRB2V6-2/3).

TABLE 2
Exemplary Oligonucleotide Primer Set
(hsTCRB PCR Primers)

| | | SEQ |
|---|---|---|
| | | ID |
| Name | Sequence | NO: |
| TRBJ1-1 | TTACCTACAACTGTGAGTCTGGTGCCTTGTCCAAA | 1631 |
| TRBJ1-2 | ACCTACAACGGTTAACCTGGTCCCCGAACCGAA | 1632 |
| TRBJ1-3 | ACCTACAACAGTGAGCCAACTTCCCTCTCCAAA | 1633 |
| TRBJ1-4 | CCAAGACAGAGAGCTGGGTTCCACTGCCAAA | 1634 |
| TRBJ1-5 | ACCTAGGATGGAGAGTCGAGTCCCATCACCAAA | 1635 |
| TRBJ1-6 | CTGTCACAGTGAGCCTGGTCCCGTTCCCAAA | 1636 |
| TRBJ2-1 | CGGTGAGCCGTGTCCCTGGCCCGAA | 1637 |
| TRBJ2-2 | CCAGTACGGTCAGCCTAGAGCCTTCTCCAAA | 1638 |
| TRBJ2-3 | ACTGTCAGCCGGGTGCCTGGGCCAAA | 1639 |
| TRBJ2-4 | AGAGCCGGGTCCCGGCGCCGAA | 1640 |
| TRBJ2-5 | GGAGCCGCGTGCCTGGCCCGAA | 1641 |
| TRBJ2-6 | GTCAGCCTGCTGCCGGCCCCGAA | 1642 |
| TRBJ2-7 | GTGAGCCTGGTGCCCGGCCCGAA | 1643 |
| TRB2V10-1 | AACAAAGGAGAAGTCTCAGATGGCTACAG | 1644 |
| TRB2V10-2 | GATAAAGGAGAAGTCCCCGATGGCTATGT | 1645 |
| TRB2V10-3 | GACAAAGGAGAAGTCTCAGATGGCTATAG | 1646 |
| TRB2V6-2/3 | GCCAAAGGAGAGGTCCCTGATGGCTACAA | 1647 |
| TRB2V6-8 | CTCTAGATTAAACACAGAGGATTTCCCAC | 1648 |
| TRB2V6-9 | AAGGAGAAGTCCCCGATGGCTACAATGTA | 1649 |
| TRB2V6-5 | AAGGAGAAGTCCCCAATGGCTACAATGTC | 1650 |
| TRB2V6-6 | GACAAAGGAGAAGTCCCGAATGGCTACAAC | 1651 |
| TRB2V6-7 | GTTCCCAATGGCTACAATGTCTCCAGATC | 1652 |
| TRB2V6-1 | GTCCCCAATGGCTACAATGTCTCCAGATT | 1653 |
| TRB2V6-4 | GTCCCTGATGGTTATAGTGTCTCCAGAGC | 1654 |
| TRB2V24-1 | ATCTCTGATGGATACAGTGTCTCTCGACA | 1655 |
| TRB2V25-1 | TTTCCTCTGAGTCAACAGTCTCCAGAATA | 1656 |
| TRB2V27 | TCCTGAAGGGTACAAAGTCTCTCGAAAAG | 1657 |
| TRB2V26 | CTCTGAGAGGTATCATGTTTCTTGAAATA | 1658 |
| TRB2V28 | TCCTGAGGGGTACAGTGTCTCTAGAGAGA | 1659 |
| TRB2V19 | TATAGCTGAAGGGTACAGCGTCTCTCGGG | 1660 |
| TRB2V4-1 | CTGAATGCCCCAACAGCTCTCTCTTAAAC | 1661 |
| TRB2V4-2/3 | CTGAATGCCCCAACAGCTCTCACTTATTC | 1662 |
| TRB2V2P | CCTGAATGCCCTGACAGCTCTCGCTTATA | 1663 |
| TRB2V3-1 | CCTAAATCTCCAGACAAAGCTCACTTAAA | 1664 |
| TRB2V3-2 | CTCACCTGACTCTCCAGACAAAGCTCAT | 1665 |
| TRB2V16 | TTCAGCTAAGTGCCTCCCAAATTCACCCT | 1666 |
| TRB2V23-1 | GATTCTCATCTCAATGCCCCAAGAACGC | 1667 |
| TRB2V18 | ATTTTCTGCTGAATTTCCCAAAGAGGGCC | 1668 |
| TRB2V17 | ATTCACAGCTGAAAGACCTAACGGAACGT | 1669 |
| TRB2V14 | TCTTAGCTGAAAGGACTGGAGGGACGTAT | 1670 |
| TRB2V2 | TTCGATGATCAATTCTCAGTTGAAAGGCC | 1671 |
| TRB2V12-1 | TTGATTCTCAGCACAGATGCCTGATGT | 1672 |
| TRB2V12-2 | GCGATTCTCAGCTGAGAGGCCTGATGG | 1673 |
| TRB2V12-3/4 | TCGATTCTCAGCTAAGATGCCTAATGC | 1674 |
| TRB2V12-5 | TTCTCAGCAGAGATGCCTGATGCAACTTTA | 1675 |
| TRB2V7-9 | GGTTCTCTGCAGAGAGGCCTAAGGGATCT | 1676 |
| TRB2V7-8 | GCTGCCCAGTGATCGCTTCTTTGCAGAAA | 1677 |
| TRB2V7-4 | GGCGGCCCAGTGGTCGGTTCTCTGCAGAG | 1678 |
| TRB2V7-6/7 | ATGATCGGTTCTCTGCAGAGAGGCCTGAGG | 1679 |
| TRB2V7-2 | AGTGATCGCTTCTCTGCAGAGAGGACTGG | 1680 |
| TRB2V7-3 | GGCTGCCCAACGATCGGTTCTTTGCAGT | 1681 |
| TRB2V7-1 | TCCCCGTGATCGGTTCTCTGCACAGAGGT | 1682 |
| TRB2V11-123 | CTAAGGATCGATTTTCTGCAGAGAGGCTC | 1683 |
| TRB2V13 | CTGATCGATTCTCAGCTCAACAGTTCAGT | 1684 |
| TRB2V5-1 | TGGTCGATTCTCAGGGCGCCAGTTCTCTA | 1685 |
| TRB2V5-3 | TAATCGATTCTCAGGGCGCCAGTTCCATG | 1686 |
| TRB2V5-4 | TCCTAGATTCTCAGGTCTCCAGTTCCCTA | 1687 |
| TRB2V5-8 | GGAAACTTCCCTCCTAGATTTTCAGGTCG | 1688 |
| TRB2V5-5 | AAGAGGAAACTTCCCTGATCGATTCTCAGC | 1689 |
| TRB2V5-6 | GGCAACTTCCCTGATCGATTCTCAGGTCA | 1690 |
| TRB2V9 | GTTCCCTGACTTGCACTCTGAACTAAAC | 1691 |
| TRB2V15 | GCCGAACACTTCTTTCTGCTTTCTTGAC | 1692 |
| TRB2V30 | GACCCCAGGACCGGCAGTTCATCCTGAGT | 1693 |
| TRB2V20-1 | ATGCAAGCCTGACCTTGTCCACTCTGACA | 1694 |
| TRB2V29-1 | CATCAGCCGCCCAAACCTAACATTCTCAA | 1695 |

[0163] In certain preferred embodiments, the V-segment and J-segment oligonucleotide primers as described herein are designed to include nucleotide sequences such that adequate information is present within the sequence of an amplification product of a rearranged adaptive immune receptor (TCR or Ig) gene to identify uniquely both the specific V and the specific J genes that give rise to the amplification product in the rearranged adaptive immune receptor locus (e.g., at least 1, 2, 3, 4, 5, 6, 7, 8, 9, 10, 11, 12, 13, 14, 15, 16, 17, 18, 19 or 20 base pairs of sequence upstream of the V gene recombination signal sequence (RSS), preferably at least about 22, 24, 26, 28, 30, 32, 34, 35, 36, 37, 38, 39 or 40 base pairs of sequence upstream of the V gene recombination signal sequence (RSS), and in certain preferred embodiments greater than 40 base pairs of sequence upstream of the V gene recombination signal sequence (RSS), and at least 1, 2, 3, 4, 5, 6, 7, 8, 9, 10, 11, 12, 13, 14, 15, 16, 17, 18, 19 or 20 base pairs downstream of the J gene RSS, preferably at least about 22, 24, 26, 28 or 30 base pairs downstream of the J gene RSS, and in certain preferred embodiments greater than 30 base pairs downstream of the J gene RSS).

[0164] This feature stands in contrast to oligonucleotide primers described in the art for amplification of TCR-encoding or Ig-encoding gene sequences, which rely primarily on the amplification reaction merely for detection of presence or absence of products of appropriate sizes for V and J segments (e.g., the presence in PCR reaction products of an amplicon of a particular size indicates presence of a V or J segment but fails to provide the sequence of the amplified PCR product and hence fails to confirm its identity, such as the common practice of spectratyping).

[0165] Oligonucleotides (e.g., primers) can be prepared by any suitable method, including direct chemical synthesis by a method such as the phosphotriester method of Narang et al., 1979, Meth. Enzymol. 68:90-99; the phosphodiester method of Brown et al., 1979, Meth. Enzymol. 68:109-151; the diethylphosphoramidite method of Beaucage et al., 1981, Tetrahedron Lett. 22:1859-1862; and the solid support method of U.S. Pat. No. 4,458,066, each incorporated herein by reference. A review of synthesis methods of conjugates of oligonucleotides and modified nucleotides is provided in Goodchild, 1990, Bioconjugate Chemistry 1(3): 165-187, incorporated herein by reference.

[0166] The term “primer,” as used herein, refers to an oligonucleotide capable of acting as a point of initiation of DNA synthesis under suitable

[0167] conditions. Such conditions include those in which synthesis of a primer extension product complementary to a nucleic acid strand is induced in the presence of four different nucleoside triphosphates and an agent for extension (e.g., a DNA polymerase or reverse transcriptase) in an appropriate buffer and at a suitable temperature.

[0168] A primer is preferably a single-stranded DNA. The appropriate length of a primer depends on the intended use of the primer but typically ranges from 6 to 50 nucleotides, or in certain embodiments, from 15-35 nucleotides. Short primer molecules generally require cooler temperatures to form sufficiently stable hybrid complexes with the template. A primer need not reflect the exact sequence of the template nucleic acid, but must be sufficiently complementary to hybridize with the template. The design of suitable primers for the amplification of a given target sequence is well known in the art and described in the literature cited herein.

[0169] As described herein, primers can incorporate additional features which allow for the detection or immobilization of the primer but do not alter the basic property of the primer, that of acting as a point of initiation of DNA synthesis. For example, primers may contain an additional nucleic acid sequence at the 5′ end which does not hybridize to the target nucleic acid, but which facilitates cloning, detection, or sequencing of the amplified product. The region of the primer which is sufficiently complementary to the template to hybridize is referred to herein as the hybridizing region.

[0170] As used herein, a primer is “specific,” for a target sequence if, when used in an amplification reaction under sufficiently stringent conditions, the primer hybridizes primarily to the target nucleic acid. Typically, a primer is specific for a target sequence if the primer-target duplex stability is greater than the stability of a duplex formed between the primer and any other sequence found in the sample. One of skill in the art will recognize that various factors, such as salt conditions as well as base composition of the primer and the location of the mismatches, will affect the specificity of the primer, and that routine experimental confirmation of the primer specificity will be needed in many cases. Hybridization conditions can be chosen under which the primer can form stable duplexes only with a target sequence. Thus, the use of target-specific primers under suitably stringent amplification conditions enables the selective amplification of those target sequences which contain the target primer binding sites.

[0171] In particular embodiments, primers for use in the methods described herein comprise or consist of a nucleic acid of at least about 15 nucleotides long that has the same sequence as, or is complementary to, a 15 nucleotide long contiguous sequence of the target V or J segment. Longer primers, e.g., those of about 16, 17, 18, 19, 20, 21, 22, 23, 24, 25, 26, 27, 28, 29, 30, 31, 32, 33, 34, 35, 36, 37, 38, 39, 40, 45, or 50, nucleotides long that have the same sequence as, or sequence complementary to, a contiguous sequence of the target V or J segment, will also be of use in certain embodiments. All intermediate lengths of the aforementioned primers are contemplated for use herein. As would be recognized by the skilled person, the primers may have additional sequence added (e.g., nucleotides that may not be the same as or complementary to the target V or J segment), such as restriction enzyme recognition sites, adaptor sequences for sequencing, barcode sequences, and the like (see e.g., primer sequences provided herein and in the sequence listing). Therefore, the length of the primers may be longer, such as 55, 56, 57, 58, 59, 60, 65, 70, 75, nucleotides in length or more, depending on the specific use or need. For example, in one embodiment, the forward and reverse primers are both modified at the 5′ end with the universal forward primer sequence compatible with a DNA sequencer.

[0172] Also contemplated for use in certain embodiments are adaptive immune receptor V-segment or J-segment oligonucleotide primer variants that may share a high degree of sequence identity to the oligonucleotide primers for which nucleotide sequences are presented herein, including those set forth in the Sequence Listing. Thus, in these and related embodiments, adaptive immune receptor V-segment or J-segment oligonucleotide primer variants may have substantial identity to the adaptive immune receptor V-segment or J-segment oligonucleotide primer sequences disclosed herein, for example, such oligonucleotide primer variants may comprise at least 70% sequence identity, preferably at least 75%, 80%, 85%, 90%, 91%, 92%, 93%, 94%, 95%, 96%, 97%, 98%, or 99% or higher sequence identity compared to a reference polynucleotide sequence such as the oligonucleotide primer sequences disclosed herein, using the methods described herein (e.g., BLAST analysis using standard parameters). One skilled in this art will recognize that these values can be appropriately adjusted to determine corresponding ability of an oligonucleotide primer variant to anneal to an adaptive immune receptor segment-encoding polynucleotide by taking into account codon degeneracy, reading frame positioning and the like.

[0173] Typically, oligonucleotide primer variants will contain one or more substitutions, additions, deletions and/or insertions, preferably such that the annealing ability of the variant oligonucleotide is not substantially diminished relative to that of an adaptive immune receptor V-segment or J-segment oligonucleotide primer sequence that is specifically set forth herein. As also noted elsewhere herein, in preferred embodiments adaptive immune receptor V-segment and J-segment oligonucleotide primers are designed to be capable of amplifying a rearranged TCR or IGH sequence that includes the coding region for CDR3.

[0174] According to certain embodiments contemplated herein, the primers for use in the multiplex PCR methods of the present disclosure may be functionally blocked to prevent non-specific priming of non-T or B cell sequences. For example, the primers may be blocked with chemical modifications as described in U.S. patent application publication US2010/0167353. According to certain herein disclosed embodiments, the use of such blocked primers in the present multiplex PCR reactions involves primers that may have an inactive configuration wherein DNA replication (i.e., primer extension) is blocked, and an activated configuration wherein DNA replication proceeds. The inactive configuration of the primer is present when the primer is either single-stranded, or when the primer is specifically hybridized to the target DNA sequence of interest but primer extension remains blocked by a chemical moiety that is linked at or near to the 3′ end of the primer.

[0175] The activated configuration of the primer is present when the primer is hybridized to the target nucleic acid sequence of interest and is subsequently acted upon by RNase H or another cleaving agent to remove the 3′ blocking group, thereby allowing an enzyme (e.g., a DNA polymerase) to catalyze primer extension in an amplification reaction. Without wishing to be bound by theory, it is believed that the kinetics of the hybridization of such primers are akin to a second order reaction, and are therefore a function of the T cell or B cell gene sequence concentration in the mixture. Blocked primers minimize non-specific reactions by requiring hybridization to the target followed by cleavage before primer extension can proceed. If a primer hybridizes incorrectly to a sequence that is related to the desired target sequence but which differs by having one or more non-complementary nucleotides that result in base-pairing mismatches, cleavage of the primer is inhibited, especially when there is a mismatch that lies at or near the cleavage site. This strategy to improve the fidelity of amplification reduces the frequency of false priming at such locations, and thereby increases the specificity of the reaction. As would be recognized by the skilled person, reaction conditions, particularly the concentration of RNase H and the time allowed for hybridization and extension in each cycle, can be optimized to maximize the difference in cleavage efficiencies between highly efficient cleavage of the primer when it is correctly hybridized to its true target sequence, and poor cleavage of the primer when there is a mismatch between the primer and the template sequence to which it may be incompletely annealed.

[0176] As described in US2010/0167353, a number of blocking groups are known in the art that can be placed at or near the 3′ end of the oligonucleotide (e.g., a primer) to prevent extension. A primer or other oligonucleotide may be modified at the 3′-terminal nucleotide to prevent or inhibit initiation of DNA synthesis by, for example, the addition of a 3′ deoxyribonucleotide residue (e.g., cordycepin), a 2′,3′-dideoxyribonucleotide residue, non-nucleotide linkages or alkane-diol modifications (U.S. Pat. No. 5,554,516). Alkane diol modifications which can be used to inhibit or block primer extension have also been described by Wilk et al., (1990 Nucleic Acids Res. 18 (8):2065), and by Arnold et al. (U.S. Pat. No. 6,031,091). Additional examples of suitable blocking groups include 3′ hydroxyl substitutions (e.g., 3′-phosphate, 3′-triphosphate or 3′-phosphate diesters with alcohols such as 3-hydroxypropyl), 2′3′-cyclic phosphate, 2′ hydroxyl substitutions of a terminal RNA base (e.g., phosphate or sterically bulky groups such as triisopropyl silyl (TIPS) or tert-butyl dimethyl silyl (TBDMS)). 2′-alkyl silyl groups such as TIPS and TBDMS substituted at the 3′-end of an oligonucleotide are described by Laikhter et al., U.S. patent application Ser. No. 11/686,894, which is incorporated herein by reference. Bulky substituents can also be incorporated on the base of the 3′-terminal residue of the oligonucleotide to block primer extension.

[0177] In certain embodiments, the oligonucleotide may comprise a cleavage domain that is located upstream (e.g., 5′ to) of the blocking group used to inhibit primer extension. As examples, the cleavage domain may be an RNase H cleavage domain, or the cleavage domain may be an RNase H2 cleavage domain comprising a single RNA residue, or the oligonucleotide may comprise replacement of the RNA base with one or more alternative nucleosides. Additional illustrative cleavage domains are described in US2010/0167353.

[0178] Thus, a multiplex PCR system may use 40, 45, 50, 55, 60, 65, 70, 75, 80, 85, or more forward primers, wherein each forward primer is complementary to a single functional TCR or Ig V segment or a small family of functional TCR or Ig V segments, e.g., a TCR Vβ segment, (see e.g., the TCRBV primers as shown in Table 2, SEQ ID NOS:1644-1695), and, for example, thirteen reverse primers, each specific to a TCR or Ig J segment, such as TCR Jβ segment (see e.g., TCRBJ primers in Table 2, SEQ ID NOS:1631-1643). In another embodiment, a multiplex PCR reaction may use four forward primers each specific to one or more functional TCRγ V segment and four reverse primers each specific for one or more TCRγ J segments. In another embodiment, a multiplex PCR reaction may use 84 forward primers each specific to one or more functional V segments and six reverse primers each specific for one or more J segments.

[0179] Thermal cycling conditions may follow methods of those skilled in the art. For example, using a PCR Express™ thermal cycler (Hybaid, Ashford, UK), the following cycling conditions may be used: 1 cycle at 95° C. for 15 minutes, 25 to 40 cycles at 94° C. for 30 seconds, 59° C. for 30 seconds and 72° C. for 1 minute, followed by one cycle at 72° C. for 10 minutes. As will be recognized by the skilled person, thermal cycling conditions may be optimized, for example, by modifying annealing temperatures, annealing times, number of cycles and extension times. As would be recognized by the skilled person, the amount of primer and other PCR reagents used, as well as PCR parameters (e.g., annealing temperature, extension times and cycle numbers), may be optimized to achieve desired PCR amplification efficiency.

[0180] Alternatively, in certain related embodiments also contemplated herein, “digital PCR” methods can be used to quantitate the number of target genomes in a sample, without the need for a standard curve. In digital PCR, the PCR reaction for a single sample is performed in a multitude of more than 100 microcells or droplets, such that each droplet either amplifies (e.g., generation of an amplification product provides evidence of the presence of at least one template molecule in the microcell or droplet) or fails to amplify (evidence that the template was not present in a given microcell or droplet). By simply counting the number of positive microcells, it is possible directly to count the number of target genomes that are present in an input sample. Digital PCR methods typically use an endpoint readout, rather than a conventional quantitative PCR signal that is measured after each cycle in the thermal cycling reaction (see, e.g., Pekin et al., 2011 Lab. Chip 11(13):2156; Zhong et al., 2011 Lab. Chip 11(13):2167; Tewhey et al., 2009 Nature Biotechnol. 27:1025; 2010 Nature Biotechnol. 28:178). Accordingly, any of the herein described compositions (e.g., adaptive immune receptor gene-specific oligonucleotide primer sets) and methods may be adapted for use in such digital PCR methodology, for example, the ABI QuantStudio™ 12K Flex System (Life Technologies, Carlsbad, Calif.), the QuantaLife™ digital PCR system (BioRad, Hercules, Calif.) or the RainDance™ microdroplet digital PCR system (RainDance Technologies, Lexington, Mass.).

[0181] Adaptors

[0182] The herein described oligonucleotides may in certain embodiments comprise first (U1) and second (U2) (and optionally third (U3) and fourth (U4)) universal adaptor oligonucleotide sequences, or may lack either or both of U1 and U2 (or U3 or U4). A universal adaptor oligonucleotide U thus may comprise either nothing or an oligonucleotide having a sequence that is selected from (i) a first universal adaptor oligonucleotide sequence, and (ii) a first sequencing platform-specific oligonucleotide sequence that is linked to and positioned 5′ to a first universal adaptor oligonucleotide sequence, and U2 may comprise either nothing or an oligonucleotide having a sequence that is selected from (i) a second universal adaptor oligonucleotide sequence, and (ii) a second sequencing platform-specific oligonucleotide sequence that is linked to and positioned 5′ to a second universal adaptor oligonucleotide sequence. A similar relationship pertains for U3 and U4.

[0183] U1 and/or U2 may, for example, comprise universal adaptor oligonucleotide sequences and/or sequencing platform-specific oligonucleotide sequences that are specific to a single-molecule sequencing technology being employed, for example the HiSeg™ or GeneAnalyzer™-2 (GA-2) systems (Illumina, Inc., San Diego, Calif.) or another suitable sequencing suite of instrumentation, reagents and software. Inclusion of such platform-specific adaptor sequences permits direct quantitative sequencing of the presently described dsDNA amplification products into which U has been incorporated as described herein, using a nucleotide sequencing methodology such as the HiSeq™ or GA2 or equivalent. This feature therefore advantageously permits qualitative and quantitative characterization of the dsDNA composition.

[0184] For example, dsDNA amplification products may be generated that have universal adaptor sequences at both ends, so that the adaptor sequences can be used to further incorporate sequencing platform-specific oligonucleotides at each end of each template.

[0185] Without wishing to be bound by theory, platform-specific oligonucleotides may be added onto the ends of such dsDNA using 5′ (5′-platform sequence-universal adaptor-1 sequence-3′) and 3′ (5′-platform sequence-universal adaptor-2 sequence-3′) oligonucleotides in three cycles of denaturation, annealing and extension, so that the relative representation in the dsDNA composition of each of the component dsDNAs is not quantitatively altered. Unique identifier sequences (e.g., barcode sequences B that are associated with and thus identify individual V and/or J regions, or sample-identifier barcodes as described herein) are placed adjacent to the adaptor sequences, thus permitting quantitative sequencing in short sequence reads, in order to characterize the DNA population by the criterion of the relative amount of each unique sequence that is present.

[0186] In addition to adaptor sequences described in the Examples and included in the exemplary template sequences in the Sequence Listing (e.g., at the 5′ and 3′ ends of SEQ ID NOS:1-1630), other oligonucleotide sequences that may be used as universal adaptor sequences will be known to those familiar with the art in view of the present disclosure. Non-limiting examples of additional adaptor sequences are shown in Table 3 and set forth in SEQ ID NOS:1710-1731.

TABLE 3
Exemplary Adaptor Sequences

| Adaptor (primer) | | SEQ ID |
|---|---|---|
| name | Sequence | NO: |
| T7 Promotor | AATACGACTCACTATAGG | 1710 |
| T7 Terminator | GCTAGTTATTGCTCAGCGG | 1711 |
| T3 | ATTAACCCTCACTAAAGG | 1712 |
| SP6 | GATTTAGGTGACACTATAG | 1713 |
| M13F(−21) | TGTAAAACGACGGCCAGT | 1714 |
| M13F(−40) | GTTTTCCCAGTCACGAC | 1715 |
| M13R Reverse | CAGGAAACACCTATGACC | 1716 |
| AOX1 Forward | GACTGGTTCCAATTGACAAGC | 1717 |
| AOX1 Reverse | GCAAATGGCATTCTGACATCC | 1718 |
| pGEX Forward | GGGCTGGCAAGCCACGTTTGGTG | 1719 |
| (GST 5, pGEX 5′) | | |
| pGEX Reverse | CCGGGAGCTGCATGTGTCAGAGG | 1720 |
| (GST 3, pGEX 3′) | | |
| BGH Reverse | AACTAGAAGGCACAGTCGAGGC | 1721 |
| GFP (C′ terminal, | CACTCTCGGCATGGACGAGC | 1722 |
| CFP, YFP or BFP) | | |
| GFP Reverse | TGGTGCAGATGAACTTCAGG | 1773 |
| GAG | GTTCGACCCCGCCTCGATCC | 1724 |
| GAG Reverse | TGACACACATTCCACAGGGTC | 1725 |
| CYC1 Reverse | GCGTGAATGTAAGCGTGAC | 1726 |
| pFastBacF | 5′-d(GGATTATTCATACCGTCCCA)-3′ | 1727 |
| pFastBacR | 5′-d(CAAATGTGGTATGGCTGATT)-3′ | 1728 |
| pBAD Forward | 5′-d(ATGCCATAGCATTTTTATCC)-3′ | 1729 |
| pBAD Reverse | 5′-d(GATTTAATCTGTATCAGG)-3′ | 1730 |
| CMV-Forward | 5′-d(CGCAAATGGGCGGTAGGCGTG)-3′ | 1731 |

[0187] Barcodes

[0188] As described herein, certain embodiments contemplate designing oligonucleotide sequences to contain short signature sequences that permit unambiguous identification of the polynucleotide sequence into which they are incorporated, and hence of at least one primer responsible for amplifying that product, without having to sequence the entire amplification product. In the herein described oligonucleotides, such barcodes B (e.g., B1, B2) are each either nothing or each comprise an oligonucleotide B that comprises an oligonucleotide barcode sequence of 3, 4, 5, 6, 7, 8, 9, 10, 11, 12, 13, 14, 15, 16, 17, 18, 19, 20, 25, 30, 35, 40, 45, 50 or more contiguous nucleotides (including all integer values therebetween), wherein in each of the plurality of oligonucleotide sequences B comprises a unique oligonucleotide sequence which uniquely identifies a particular V and/or J oligonucleotide primer sequence.

[0189] Exemplary barcodes may comprise a first barcode oligonucleotide of 5, 6, 7, 8, 9, 10, 11, 12, 13, 14, 15 or 16 nucleotides that uniquely identifies each oligonucleotide primer (e.g., a V or a J primer) in the primer composition, and optionally in certain embodiments a second barcode oligonucleotide of 5, 6, 7, 8, 9, 10, 11, 12, 13, 14, 15 or 16 nucleotides that uniquely identifies each partner primer in a primer set (e.g., a J or a V primer), to provide barcodes of, respectively, 5, 6, 7, 8, 9, 10, 11, 12, 13, 14, 15, 16, 17, 18, 19, 20, 21, 22, 23, 24, 25, 26, 27, 28, 29, 30, 31 or 32 nucleotides in length, but these and related embodiments are not intended to be so limited. Barcode oligonucleotides may comprise oligonucleotide sequences of any length, so long as a minimum barcode length is obtained that precludes occurrence of a given barcode sequence in two or more product polynucleotides having otherwise distinct sequences (e.g., V and J sequences).

[0190] Thus, the minimum barcode length, to avoid such redundancy amongst the barcodes that are used to uniquely identify different V-J sequence pairings, is X nucleotides, where 4^{x} is greater than the number of distinct template species that are to be differentiated on the basis of having non-identical sequences. In practice, barcode oligonucleotide sequence read lengths may be limited only by the sequence read-length limits of the nucleotide sequencing instrument to be employed. For certain embodiments, different barcode oligonucleotides that will distinguish individual species of template oligonucleotides should have at least two nucleotide mismatches (e.g., a minimum hamming distance of 2) when aligned to maximize the number of nucleotides that match at particular positions in the barcode oligonucleotide sequences.

[0191] The skilled artisan will be familiar with the design, synthesis, and incorporation into a larger oligonucleotide or polynucleotide construct, of oligonucleotide barcode sequences of, for instance, at least 3, 4, 5, 6, 7, 8, 9, 10, 11, 12, 13, 14, 15, 16, 17, 18, 19, 20, 21, 22, 23, 24, 25, 30, 35 or more contiguous nucleotides, including all integer values therebetween. For non-limiting examples of the design and implementation of oligonucleotide barcode sequence identification strategies, see, e.g., de Carcer et al., 2011 Adv. Env. Microbiol. 77:6310; Parameswaran et al., 2007 Nucl. Ac. Res. 35(19):330; Roh et al., 2010 Trends Biotechnol. 28:291.

[0192] Typically, barcodes are placed in oligonucleotides at locations where they are not found naturally, i.e., barcodes comprise nucleotide sequences that are distinct from any naturally occurring oligonucleotide sequences that may be found in the vicinity of the sequences adjacent to which the barcodes are situated (e.g., V and/or J sequences). Such barcode sequences may be included, according to certain embodiments described herein, as elements B1 and/or B2 of the presently disclosed oligonucleotides. Accordingly, certain of the herein described oligonucleotide compositions may in certain embodiments comprise one, two or more barcodes, while in certain other embodiments some or all of these barcodes may be absent. In certain embodiments all barcode sequences will have identical or similar GC content (e.g., differing in GC content by no more than 20%, or by no more than 19, 18, 17, 16, 15, 14, 13, 12, 11 or 10%).

[0193] Sequencing

[0194] Sequencing may be performed using any of a variety of available high through-put single molecule sequencing machines and systems. Illustrative sequence systems include sequence-by-synthesis systems such as the Illumina Genome Analyzer and associated instruments (Illumina, Inc., San Diego, Calif.), Helicos Genetic Analysis System (Helicos BioSciences Corp., Cambridge, Mass.), Pacific Biosciences PacBio RS (Pacific Biosciences, Menlo Park, Calif.), or other systems having similar capabilities. Sequencing is achieved using a set of sequencing oligonucleotides that hybridize to a defined region within the amplified DNA molecules. The sequencing oligonucleotides are designed such that the V- and J-encoding gene segments can be uniquely identified by the sequences that are generated, based on the present disclosure and in view of known adaptive immune receptor gene sequences that appear in publicly available databases. See, e.g., U.S. Ser. No. 13/217,126; U.S. Ser. No. 12/794,507; PCT/US2011/026373; or PCT/US2011/049012. Exemplary TCRB J-region sequencing primers are set forth in Table 4:

TABLE 4
TCRBJ Sequencink Primers

| | | SEQ ID |
|---|---|---|
| PRIMER | SEQUENCE | NO: |
| >Jseq1-1 | ACAACTGTGAGTCTGGTGCCTTGTCCAAAGAAA | 1696 |
| >Jseq1-2 | ACAACGGTTAACCTGGTCCCCGAACCGAAGGTG | 1697 |
| >Jseq1-3 | ACAACAGTGAGCCAACTTCCCTCTCCAAAATAT | 1698 |
| >Jseq1-4 | AAGACAGAGAGCTGGGTTCCACTGCCAAAAAAC | 1699 |
| >Jseq1-5 | AGGATGGAGAGTCGAGTCCCATCACCAAAATGC | 1700 |
| >Jseq1-6 | GTCACAGTGAGCCTGGTCCCGTTCCCAAAGTGG | 1701 |
| >Jseq2-1 | AGCACGGTGAGCCGTGTCCCTGGCCCGAAGAAC | 1702 |
| >Jseq2-2 | AGTACGGTCAGCCTAGAGCCTTCTCCAAAAAAC | 1703 |
| >Jseq2-3 | AGCACTGTCAGCCGGGTGCCTGGGCCAAAATAC | 1704 |
| >Jseq2-4 | AGCACTGAGAGCCGGGTCCCGGCGCCGAAGTAC | 1705 |
| >Jseq2-5 | AGCACCAGGAGCCGCGTGCCTGGCCCGAAGTAC | 1706 |
| >Jseq2-6 | AGCACGGTCAGCCTGCTGCCGGCCCCGAAAGTC | 1707 |
| >Jseq2-7 | GTGACCGTGAGCCTGGTGCCCGGCCCGAAGTAC | 1708 |

[0195] The term “gene” means the segment of DNA involved in producing a polypeptide chain such as all or a portion of a TCR or Ig polypeptide (e.g., a CDR3-containing polypeptide); it includes regions preceding and following the coding region “leader and trailer” as well as intervening sequences (introns) between individual coding segments (exons), and may also include regulatory elements (e.g., promoters, enhancers, repressor binding sites and the like), and may also include recombination signal sequences (RSSs) as described herein.

[0196] The nucleic acids of the present embodiments, also referred to herein as polynucleotides, may be in the form of RNA or in the form of DNA, which DNA includes cDNA, genomic DNA, and synthetic DNA. The DNA may be double-stranded or single-stranded, and if single stranded may be the coding strand or non-coding (anti-sense) strand. A coding sequence which encodes a TCR or an immunoglobulin or a region thereof (e.g., a V region, a D segment, a J region, a C region, etc.) for use according to the present embodiments may be identical to the coding sequence known in the art for any given TCR or immunoglobulin gene regions or polypeptide domains (e.g., V-region domains, CDR3 domains, etc.), or may be a different coding sequence, which, as a result of the redundancy or degeneracy of the genetic code, encodes the same TCR or immunoglobulin region or polypeptide.

[0197] In certain embodiments, the amplified J-region encoding gene segments may each have a unique sequence-defined identifier tag of 2, 3, 4, 5, 6, 7, 8, 9, 10 or about 15, 20 or more nucleotides, situated at a defined position relative to a RSS site. For example, a four-base tag may be used, in the Jβ-region encoding segment of amplified TCRP CDR3-encoding regions, at positions +11 through +14 downstream from the RSS site. However, these and related embodiments need not be so limited and also contemplate other relatively short nucleotide sequence-defined identifier tags that may be detected in J-region encoding gene segments and defined based on their positions relative to an RSS site. These may vary between different adaptive immune receptor encoding loci.

[0198] The recombination signal sequence (RSS) consists of two conserved sequences (heptamer, 5′-CACAGTG-3′, and nonamer, 5′-ACAAAAACC-3′), separated by a spacer of either 12+/−1 by (“12-signal”) or 23+/−1 by (“23-signal”). A number of nucleotide positions have been identified as important for recombination including the CA dinucleotide at position one and two of the heptamer, and a C at heptamer position three has also been shown to be strongly preferred as well as an A nucleotide at positions 5, 6, 7 of the nonamer. (Ramsden et. al 1994; Akamatsu et. al. 1994; Hesse et. al. 1989). Mutations of other nucleotides have minimal or inconsistent effects. The spacer, although more variable, also has an impact on recombination, and single-nucleotide replacements have been shown to significantly impact recombination efficiency (Fanning et. al. 1996, Larijani et. al 1999; Nadel et. al. 1998). Criteria have been described for identifying RSS polynucleotide sequences having significantly different recombination efficiencies (Ramsden et. al 1994; Akamatsu et. al. 1994; Hesse et. al. 1989 and Cowell et. al. 1994). Accordingly, the sequencing oligonucleotides may hybridize adjacent to a four base tag within the amplified J-encoding gene segments at positions +11 through +14 downstream of the RSS site. For example, sequencing oligonucleotides for TCRB may be designed to anneal to a consensus nucleotide motif observed just downstream of this “tag”, so that the first four bases of a sequence read will uniquely identify the J-encoding gene segment (see, e.g., WO/2012/027503).

[0199] The average length of the CDR3-encoding region, for the TCR, defined as the nucleotides encoding the TCR polypeptide between the second conserved cysteine of the V segment and the conserved phenylalanine of the J segment, is 35+/−3 nucleotides. Accordingly and in certain embodiments, PCR amplification using V-segment oligonucleotide primers with J-segment oligonucleotide primers that start from the J segment tag of a particular TCR or IgH J region (e.g., TCR Jβ, TCR Jγ or IgH JH as described herein) will nearly always capture the complete V-D-J junction in a 50 base pair read. The average length of the IgH CDR3 region, defined as the nucleotides between the conserved cysteine in the V segment and the conserved phenylalanine in the J segment, is less constrained than at the TCRβ locus, but will typically be between about 10 and about 70 nucleotides. Accordingly and in certain embodiments, PCR amplification using V-segment oligonucleotide primers with J-segment oligonucleotide primers that start from the IgH J segment tag will capture the complete V-D-J junction in a 100 base pair read.

[0200] PCR primers that anneal to and support polynucleotide extension on mismatched template sequences are referred to as promiscuous primers. In certain embodiments, the TCR and Ig J-segment reverse PCR primers may be designed to minimize overlap with the sequencing oligonucleotides, in order to minimize promiscuous priming in the context of multiplex PCR. In one embodiment, the TCR and Ig J-segment reverse primers may be anchored at the 3′ end by annealing to the consensus splice site motif, with minimal overlap of the sequencing primers. Generally, the TCR and Ig V and J-segment primers may be selected to operate in PCR at consistent annealing temperatures using known sequence/primer design and analysis programs under default parameters.

[0201] For the sequencing reaction, the exemplary IGHJ sequencing primers extend three nucleotides across the conserved CAG sequences as described in WO/2012/027503.

[0202] Samples

[0203] The subject or biological source, from which a test biological sample may be obtained, may be a human or non-human animal, or a transgenic or cloned or tissue-engineered (including through the use of stem cells) organism. In certain preferred embodiments of the invention, the subject or biological source may be known to have, or may be suspected of having or being at risk for having, a circulating or solid tumor or other malignant condition, or an autoimmune disease, or an inflammatory condition, and in certain preferred embodiments of the invention the subject or biological source may be known to be free of a risk or presence of such disease.

[0204] Certain preferred embodiments contemplate a subject or biological source that is a human subject such as a patient that has been diagnosed as having or being at risk for developing or acquiring cancer according to art-accepted clinical diagnostic criteria, such as those of the U.S. National Cancer Institute (Bethesda, Md., USA) or as described in DeVita, Hellman, and Rosenberg's Cancer: Principles and Practice of Oncology (2008, Lippincott, Williams and Wilkins, Philadelphia/Ovid, New York); Pizzo and Poplack, Principles and Practice of Pediatric Oncology (Fourth edition, 2001, Lippincott, Williams and Wilkins, Philadelphia/Ovid, New York); and Vogelstein and Kinzler, The Genetic Basis of Human Cancer (Second edition, 2002, McGraw Hill Professional, New York); certain embodiments contemplate a human subject that is known to be free of a risk for having, developing or acquiring cancer by such criteria.

[0205] Certain other embodiments contemplate a non-human subject or biological source, for example a non-human primate such as a macaque, chimpanzee, gorilla, vervet, orangutan, baboon or other non-human primate, including such non-human subjects that may be known to the art as preclinical models, including preclinical models for solid tumors and/or other cancers. Certain other embodiments contemplate a non-human subject that is a mammal, for example, a mouse, rat, rabbit, pig, sheep, horse, bovine, goat, gerbil, hamster, guinea pig or other mammal; many such mammals may be subjects that are known to the art as preclinical models for certain diseases or disorders, including circulating or solid tumors and/or other cancers (e.g., Talmadge et al., 2007 Am. J. Pathol. 170:793; Kerbel, 2003 Canc. Biol. Therap. 2(4 Suppl 1):5134; Man et al., 2007 Canc. Met. Rev. 26:737; Cespedes et al., 2006 Clin. Transl. Oncol. 8:318). The range of embodiments is not intended to be so limited, however, such that there are also contemplated other embodiments in which the subject or biological source may be a non-mammalian vertebrate, for example, another higher vertebrate, or an avian, amphibian or reptilian species, or another subject or biological source.

[0206] Biological samples may be provided by obtaining a blood sample, biopsy specimen, tissue explant, organ culture, biological fluid or any other tissue or cell preparation from a subject or a biological source. Preferably the sample comprises DNA from lymphoid cells of the subject or biological source, which, by way of illustration and not limitation, may contain rearranged DNA at one or more TCR or BCR loci. In certain embodiments a test biological sample may be obtained from a solid tissue (e.g., a solid tumor), for example by surgical resection, needle biopsy or other means for obtaining a test biological sample that contains a mixture of cells.

[0207] According to certain embodiments it may be desirable to isolate lymphoid cells (e.g., T cells and/or B cells) according to any of a large number of established methodologies, where isolated lymphoid cells are those that have been removed or separated from the tissue, environment or milieu in which they naturally occur. B cells and T cells can thus be obtained from a biological sample, such as from a variety of tissue and biological fluid samples including bone marrow, thymus, lymph glands, lymph nodes, peripheral tissues and blood, but peripheral blood is most easily accessed. Any peripheral tissue can be sampled for the presence of B and T cells and is therefore contemplated for use in the methods described herein. Tissues and biological fluids from which adaptive immune cells, may be obtained include, but are not limited to skin, epithelial tissues, colon, spleen, a mucosal secretion, oral mucosa, intestinal mucosa, vaginal mucosa or a vaginal secretion, cervical tissue, ganglia, saliva, cerebrospinal fluid (CSF), bone marrow, cord blood, serum, serosal fluid, plasma, lymph, urine, ascites fluid, pleural fluid, pericardial fluid, peritoneal fluid, abdominal fluid, culture medium, conditioned culture medium or lavage fluid. In certain embodiments, adaptive immune cells may be isolated from an apheresis sample. Peripheral blood samples may be obtained by phlebotomy from subjects. Peripheral blood mononuclear cells (PBMC) are isolated by techniques known to those of skill in the art, e.g., by Ficoll-Hypaque® density gradient separation. In certain embodiments, whole PBMCs are used for analysis.

[0208] For nucleic acid extraction, total genomic DNA may be extracted from cells using methods known in the art and/or commercially available kits, e.g., by using the QIAamp® DNA blood Mini Kit (QIAGEN®). The approximate mass of a single haploid genome is 3 pg. Preferably, at least 100,000 to 200,000 cells are used for analysis, i.e., about 0.6 to 1.2 μg DNA from diploid T or B cells. Using PBMCs as a source, the number of T cells can be estimated to be about 30% of total cells. The number of B cells can also be estimated to be about 30% of total cells in a PBMC preparation.

[0209] The Ig and TCR gene loci contain many different variable (V), diversity (D), and joining (J) gene segments, which are subjected to rearrangement processes during early lymphoid differentiation. Ig and TCR V, D and J gene segment sequences are known in the art and are available in public databases such as GENBANK. The V-D-J rearrangements are mediated via a recombinase enzyme complex in which the RAG1 and RAG2 proteins play a key role by recognizing and cutting the DNA at the recombination signal sequences (RSS), which are located downstream of the V gene segments, at both sides of the D gene segments, and upstream of the J gene segments. Inappropriate RSS reduce or even completely prevent rearrangement. The recombination signal sequence (RSS) consists of two conserved sequences (heptamer, 5′-CACAGTG-3′, and nonamer, 5′-ACAAAAACC-3′), separated by a spacer of either 12+/−1 by (“12-signal”) or 23+/−1 by (“23-signal”).

[0210] A number of nucleotide positions have been identified as important for recombination including the CA dinucleotide at position one and two of the heptamer, and a C at heptamer position three has also been shown to be strongly preferred as well as an A nucleotide at positions 5, 6, 7 of the nonamer. (Ramsden et al. 1994 Nucl. Ac. Res. 22:1785; Akamatsu et. al. 1994 J. Immunol. 153:4520; Hesse et. al. 1989 Genes Dev. 3:1053). Mutations of other nucleotides have minimal or inconsistent effects. The spacer, although more variable, also has an impact on recombination, and single-nucleotide replacements have been shown to significantly impact recombination efficiency (Fanning et. al. 1996 Cell. Immunol. Immunopath. 79:1, Larijani et al. 1999 Nucl. Ac. Res. 27:2304; Nadel et al. 1998 J. Immunol. 161:6068; Nadel et al., 1998 J. Exp. Med. 187:1495). Criteria have been described for identifying RSS polynucleotide sequences having significantly different recombination efficiencies (Ramsden et al 1994 Nucl. Ac. Res. 22:1785; Akamatsu et. al. 1994 J. Immunol. 153:4520; Hesse et al. 1989 Genes Dev. 3:1053, and Lee et al., 2003 PLoS 1(1):E1).

[0211] The rearrangement process generally starts with a D to J rearrangement followed by a V to D-J rearrangement in the case of Ig heavy chain (IgH), TCR beta (TCRB), and TCR delta (TCRD) genes or concerns direct V to J rearrangements in case of Ig kappa (IgK), Ig lambda (IgL), TCR alpha (TCRA), and TCR gamma (TCRG) genes. The sequences between rearranging gene segments are generally deleted in the form of a circular excision product, also called TCR excision circle (TREC) or B cell receptor excision circle (BREC).

[0212] The many different combinations of V, D, and J gene segments represent the so-called combinatorial repertoire, which is estimated to be ˜2×10⁶ for Ig molecules, ˜3×10⁶ for TCRαβ and ˜5×10³ for TCRγδ molecules. At the junction sites of the V, D, and J gene segments, deletion and random insertion of nucleotides occurs during the rearrangement process, resulting in highly diverse junctional regions, which significantly contribute to the total repertoire of Ig and TCR molecules, estimated to be >10¹².

[0213] Mature B-lymphocytes further extend their Ig repertoire upon antigen recognition in follicle centers via somatic hypermutation, a process, leading to affinity maturation of the Ig molecules. The somatic hypermutation process focuses on the V-(D-) J exon of IgH and Ig light chain genes and concerns single nucleotide mutations and sometimes also insertions or deletions of nucleotides. Somatically-mutated Ig genes are also found in mature B-cell malignancies of follicular or post-follicular origin.

[0214] In certain embodiments described herein, V-segment and J-segment primers may be employed in a PCR reaction to amplify rearranged TCR or BCR CDR3-encoding DNA regions in a test biological sample, wherein each functional TCR or Ig V-encoding gene segment comprises a V gene recombination signal sequence (RSS) and each functional TCR or Ig J-encoding gene segment comprises a J gene RSS. In these and related embodiments, each amplified rearranged DNA molecule may comprise (i) at least about 10, 20, 30, 40, 50, 60, 70, 80, 90, 100, 200, 300, 400, 500, 600, 700, 800, 900, 1000 (including all integer values therebetween) or more contiguous nucleotides of a sense strand of the TCR or Ig V-encoding gene segment, with the at least about 10, 20, 30, 40, 50, 60, 70, 80, 90, 100, 200, 300, 400, 500, 600, 700, 800, 900, 1000 or more contiguous nucleotides being situated 5′ to the V gene RSS and/or each amplified rearranged DNA molecule may comprise (ii) at least about 10, 20, 30, 40, 50, 60, 70, 80, 90, 100, 200, 300, 400, 500 (including all integer values therebetween) or more contiguous nucleotides of a sense strand of the TCR or Ig J-encoding gene segment, with the at least about 10, 20, 30, 40, 50, 60, 70, 80, 90, 100, 200, 300, 400, 500 or more contiguous nucleotides being situated 3′ to the J gene RSS.

[0215] The practice of certain embodiments of the present invention will employ, unless indicated specifically to the contrary, conventional methods in microbiology, molecular biology, biochemistry, molecular genetics, cell biology, virology and immunology techniques that are within the skill of the art, and reference to several of which is made below for the purpose of illustration. Such techniques are explained fully in the literature. See, e.g., Sambrook, et al., Molecular Cloning: A Laboratory Manual (3^{rd} Edition, 2001); Sambrook, et al., Molecular Cloning: A Laboratory Manual (2^{nd} Edition, 1989); Maniatis et al., Molecular Cloning: A Laboratory Manual (1982); Ausubel et al., Current Protocols in Molecular Biology (John Wiley and Sons, updated July 2008); Short Protocols in Molecular Biology: A Compendium of Methods from Current Protocols in Molecular Biology, Greene Pub. Associates and Wiley-Interscience; Glover, DNA Cloning: A Practical Approach, vol. I & II (IRL Press, Oxford Univ. Press USA, 1985); Current Protocols in Immunology (Edited by: John E. Coligan, Ada M. Kruisbeek, David H. Margulies, Ethan M. Shevach, Warren Strober 2001 John Wiley & Sons, NY, N.Y.); Real-Time PCR: Current Technology and Applications, Edited by Julie Logan, Kirstin Edwards and Nick Saunders, 2009, Caister Academic Press, Norfolk, UK; Anand, Techniques for the Analysis of Complex Genomes, (Academic Press, New York, 1992); Guthrie and Fink, Guide to Yeast Genetics and Molecular Biology (Academic Press, New York, 1991); Oligonucleotide Synthesis (N. Gait, Ed., 1984); Nucleic Acid Hybridization (B. Hames & S. Higgins, Eds., 1985); Transcription and Translation (B. Hames & S. Higgins, Eds., 1984); Animal Cell Culture (R. Freshney, Ed., 1986); Perbal, A Practical Guide to Molecular Cloning (1984); Next-Generation Genome Sequencing (Janitz, 2008 Wiley-VCH); PCR Protocols (Methods in Molecular Biology) (Park, Ed., 3^{rd} Edition, 2010 Humana Press); Immobilized Cells And Enzymes (IRL Press, 1986); the treatise, Methods In Enzymology (Academic Press, Inc., N.Y.); Gene Transfer Vectors For Mammalian Cells (J. H. Miller and M. P. Calos eds., 1987, Cold Spring Harbor Laboratory); Harlow and Lane, Antibodies, (Cold Spring Harbor Laboratory Press, Cold Spring Harbor, N.Y., 1998); Immunochemical Methods In Cell And Molecular Biology (Mayer and Walker, eds., Academic Press, London, 1987); Handbook Of Experimental Immunology, Volumes I-IV (D. M. Weir and CC Blackwell, eds., 1986); Riott, Essential Immunology, 6th Edition, (Blackwell Scientific Publications, Oxford, 1988); Embryonic Stem Cells: Methods and Protocols (Methods in Molecular Biology) (Kurstad Turksen, Ed., 2002); Embryonic Stem Cell Protocols: Volume I: Isolation and Characterization (Methods in Molecular Biology) (Kurstad Turksen, Ed., 2006); Embryonic Stem Cell Protocols: Volume II: Differentiation Models (Methods in Molecular Biology) (Kurstad Turksen, Ed., 2006); Human Embryonic Stem Cell Protocols (Methods in Molecular Biology) (Kursad Turksen Ed., 2006); Mesenchymal Stem Cells: Methods and Protocols (Methods in Molecular Biology) (Darwin J. Prockop, Donald G. Phinney, and Bruce A. Bunnell Eds., 2008); Hematopoietic Stem Cell Protocols (Methods in Molecular Medicine) (Christopher A. Klug, and Craig T. Jordan Eds., 2001); Hematopoietic Stem Cell Protocols (Methods in Molecular Biology) (Kevin D. Bunting Ed., 2008) Neural Stem Cells: Methods and Protocols (Methods in Molecular Biology) (Leslie P. Weiner Ed., 2008).

[0216] Unless specific definitions are provided, the nomenclature utilized in connection with, and the laboratory procedures and techniques of, molecular biology, analytical chemistry, synthetic organic chemistry, and medicinal and pharmaceutical chemistry described herein are those well known and commonly used in the art. Standard techniques may be used for recombinant technology, molecular biological, microbiological, chemical syntheses, chemical analyses, pharmaceutical preparation, formulation, and delivery, and treatment of patients.

[0217] The term “isolated” means that the material is removed from its original environment (e.g., the natural environment if it is naturally occurring). For example, a naturally occurring tissue, cell, nucleic acid or polypeptide present in its original milieu in a living animal is not isolated, but the same tissue, cell, nucleic acid or polypeptide, separated from some or all of the co-existing materials in the natural system, is isolated. Such nucleic acid could be part of a vector and/or such nucleic acid or polypeptide could be part of a composition (e.g., a cell lysate), and still be isolated in that such vector or composition is not part of the natural environment for the nucleic acid or polypeptide. The term “gene” means the segment of DNA involved in producing a polypeptide chain; it includes regions preceding and following the coding region “leader and trailer” as well as intervening sequences (introns) between individual coding segments (exons).

[0218] Unless the context requires otherwise, throughout the present specification and claims, the word “comprise” and variations thereof, such as, “comprises” and “comprising” are to be construed in an open, inclusive sense, that is, as “including, but not limited to”. By “consisting of” is meant including, and typically limited to, whatever follows the phrase “consisting of:” By “consisting essentially of” is meant including any elements listed after the phrase, and limited to other elements that do not interfere with or contribute to the activity or action specified in the disclosure for the listed elements. Thus, the phrase “consisting essentially of” indicates that the listed elements are required or mandatory, but that no other elements are required and may or may not be present depending upon whether or not they affect the activity or action of the listed elements.

[0219] In this specification and the appended claims, the singular forms “a,” “an” and “the” include plural references unless the content clearly dictates otherwise. As used herein, in particular embodiments, the terms “about” or “approximately” when preceding a numerical value indicates the value plus or minus a range of 5%, 6%, 7%, 8% or 9%. In other embodiments, the terms “about” or “approximately” when preceding a numerical value indicates the value plus or minus a range of 10%, 11%, 12%, 13% or 14%. In yet other embodiments, the terms “about” or “approximately” when preceding a numerical value indicates the value plus or minus a range of 15%, 16%, 17%, 18%, 19% or 20%.

[0220] Reference throughout this specification to “one embodiment” or “an embodiment” or “an aspect” means that a particular feature, structure or characteristic described in connection with the embodiment is included in at least one embodiment of the present invention. Thus, the appearances of the phrases “in one embodiment” or “in an embodiment” in various places throughout this specification are not necessarily all referring to the same embodiment. Furthermore, the particular features, structures, or characteristics may be combined in any suitable manner in one or more embodiments.

### EXAMPLES

### Example 1

### Single Molecule Labeling

[0221] The single molecule labeling process used a Polymerase Chain Reaction approach to tag adaptive immune receptor encoding sequences with a unique barcode and a universal primer. The PCR reaction to tag the individual barcodes used QIAGEN Multiplex PCR master mix (QIAGEN part number 206145, Qiagen, Valencia, Calif.), 10% Q-solution (QIAGEN), and 300 ng of template DNA. The pooled primers were added so the final reaction had an aggregate forward primer concentration of 2 uM and an aggregate reverse primer concentration of 2 uM. The forward primers were composed of nucleotide sequence portions that annealed to V genes (segments that annealed to the V genes are shown in Table 2) and at the 5′ end a universal primer (pGEX f, Table 3). The aggregate primer is listed in Table 6. These primers may, for greater specificity, have a random nucleotide insertion between the 3′ end of the V primer and the 5′ end of the universal primer sequence. The reverse primers have a section of nucleotides that can anneal to the J gene region (Table 2), on the 5′ end of the J primer an 8 by barcode composed of random nucleotides, and on the 5′ end of the 8 by random barcode a universal primer (pGEXr, Table 3). An example of these primers is listed in Table 5. The S by barcode made of random nucleotides may be shorter or longer, additional basepairs increase the number of unique barcodes.

[0222] The nucleotide tags were incorporated onto the molecules in a 7 cycle PCR reaction. The thermocycle conditions were: 95° C. for 5 minutes, followed by 7 cycles of 95° for 30 sec, 68° for 90 sec, and 72° for 30 sec. Following cycling, the r×n is held for 10 minutes at 72°.

[0223] Once the antigen receptor molecules were tagged by the primers carrying a random 8 by tag, any remaining primers were destroyed using ExoSAP-IT (Product #78200, Affymetrix, Santa Clara, Calif.). ExoSAP-IT is a product from Affymetrix that uses Exonuclease I and Shrimp Alkaline Phosphatase activities; the Exonuclease I destroys single stranded DNA and SAP degrades dNTPs. For this example, 10 ul of PCR reagents and 4 ul of exoSAP-IT were used. The reaction was incubated for 15 minutes at 37° C. and the ExoSAP-it was inactivated by a 15 minute incubation at 80° C. At this point, the molecules were uniquely tagged with a barcode and a universal primer. To amplify the tagged products, another PCR reaction was performed with the universal pGEX primers. This reaction used QIAGEN Multiplex PCR master mix (QIAGEN part number 206145, Qiagen, Valencia, Calif.), 10% Q-solution (QIAGEN), and 6 ul of cleaned PCR reaction as template. The forward universal (pGEXf) primer was added to the mix so the final concentration was 2 uM and the reverse universal primer (pgEXr) was added to the reaction so its final concentration was 2 uM. To sequence these molecules, an Illumina adapter was incorporated using the pGEX primers. The reaction conditions were the same as above, except that the primers were replaced with the tailing primers (Table 7 below (SEQ ID NOs: 5686-5877). The Illumina adapters, which also included an 8 by tag and a 6 by random set of nucleotides, were incorporated onto the molecules in a 7 cycle PCR reaction. The thermocycle conditions were: 95° C. for 5 minutes, followed by 7 cycles of 95° for 30 sec, 68° for 90 sec, and 72° for 30 sec. Following cycling, the reaction was held for 10 minutes at 72°.

[0224] Once the labeled molecules were “tailed” with Illumina adaptors, they were amenable to sequencing. For this example, sequencing was conducted through the 8 by randomer into the adaptive immune receptor encoding sequence on an Illumina HIS EQT™ sequencing platform. The sequenced molecules included an 8 by random tag. Every sequenced molecule having identical CDR3 and 8 by random tag sequences was amplified from the adaptive immune receptor encoding polynucleotide sequences of a single cell.

[0225] Table 5 shows the J primers for the single molecule sequencing (reverse primers) and Table 6 shows the V primers (forward primers). The PCR protocol is short: 1st PCR (5 cycles) with the above primers to uniquely tag each molecule, followed by a second PCR (35 cycles) with a universal primer (PGEX) to amplify the molecules. These reactions are followed by a PCR reaction to tail on the Illumina adapters.

TABLE 5

| | | SEQ | |
|---|---|---|---|
| | | ID | |
| J Primer Name | Bases | NO: | Sequence |
| pGEXr_TCRBJ1-1_vD12 | 60 | 5613 | CCG GGA GCT GCA |
| | | | TGT GTC AGA GGN |
| | | | NNN NNN NGT CTT |
| | | | ACC TAC AAC TGT |
| | | | GAG TCT GGT GCC |
| pGEXr_TCRBJ1-2_vD12 | 59 | 5614 | CCG GGA GCT GCA |
| | | | TGT GTC AGA GGN |
| | | | NNN NNN NCC TTA |
| | | | CCT ACA ACG GTT |
| | | | AAC CTG GTC CC |
| pGEXr_TCRBJ1-3_vD12 | 62 | 5615 | CCG GGA GCT GCA |
| | | | TGT GTC AGA GGN |
| | | | NNN NNN NCT TAC |
| | | | TCA CCT ACA ACA |
| | | | GTG AGC CAA CTT |
| | | | CC |
| pGEXr_TCRBJ1-4_vD12 | 57 | 5616 | CCG GGA GCT GCA |
| | | | TGT GTC AGA GGN |
| | | | NNN NNN NAT ACC |
| | | | CAA GAC AGA GAG |
| | | | CTG GGT TCC |
| pGEXr_TCRBJ1-5_vD12 | 60 | 5617 | CCG GGA GCT GCA |
| | | | TGT GTC AGA GGN |
| | | | NNN NNN NAA CTT |
| | | | ACC TAG GAT GGA |
| | | | GAG TCG AGT CCC |
| pGEXr_TCRBJ1-6_vD12 | 53 | 5618 | CCG GGA GCT GCA |
| | | | TGT GTC AGA GGN |
| | | | NNN NNN NCT GTC |
| | | | ACA GTG AGC CTG |
| | | | GTC CC |
| pGEXr_TCRBJ2-1_vD12 | 49 | 5619 | CCG GGA GCT GCA |
| | | | TGT GTC AGA GGN |
| | | | NNN NNN NCA CGG |
| | | | TGA GCC GTG TCC |
| | | | C |
| pGEXr_TCRBJ2-2_vD12 | 53 | 5620 | CCG GGA GCT GCA |
| | | | TGT GTC AGA GGN |
| | | | NNN NNN NCC AGT |
| | | | ACG GTC AGC CTA |
| | | | GAG CC |
| pGEXr_TCRBJ2-3_vD12 | 49 | 5621 | CCG GGA GCT GCA |
| | | | TGT GTC AGA GGN |
| | | | NNN NNN NCA CTG |
| | | | TCA GCC GGG TGC |
| | | | C |
| pGEXr_TCRBJ2-4_vD12 | 49 | 5622 | CCG GGA GCT GCA |
| | | | TGT GTC AGA GGN |
| | | | NNN NNN NCA CTG |
| | | | AGA GCC GGG TCC |
| | | | C |
| pGEXr_TCRBJ2-5_vD12 | 48 | 5623 | CCG GGA GCT GCA |
| | | | TGT GTC AGA GGN |
| | | | NNN NNN NAC CAG |
| | | | GAG CCG CGT GCC |
| pGEXr_TCRBJ2-6_vD12 | 49 | 5624 | CCG GGA GCT GCA |
| | | | TGT GTC AGA GGN |
| | | | NNN NNN NCA CGG |
| | | | TCA GCC TGC TGC |
| | | | C |
| pGEXr_TCRBJ2-7_vD12 | 49 | 5625 | CCG GGA GCT GCA |
| | | | TGT GTC AGA GGN |
| | | | NNN NNN NGA CCG |
| | | | TGA GCC TGG TGC |
| | | | C |

TABLE 6

| | SEQ ID | |
|---|---|---|
| Primer Name | NO: | Sequence |
| pGEXf_TCRB | 5626 | GGGCTGGCAAGCCACGTTTGGTGGAAT |
| V0l_verD10 | | GCCCTGACAGCTCTCGCTTATA |
| pGEXf_TCRB | 5627 | GGGCTGGCAAGCCACGTTTGGTGCTCA |
| V02_verD10 | | GAGAAGTCTGAAATATTCGATGATCAA |
| | | TTCTCAGTTG |
| pGEXf_TCRB | 5628 | GGGCTGGCAAGCCACGTTTGGTGCCAA |
| V03-1_verD10 | | ATCGMTTCTCACCTAAATCTCCAGACA |
| | | AAG |
| pGEXf_TCRB | 5629 | GGGCTGGCAAGCCACGTTTGGTGCACC |
| V03-2_verD10 | | TGACTCTCCAGACAAAGCTCAT |
| pGEXf_TCRB | 5630 | GGGCTGGCAAGCCACGTTTGGTGCCTG |
| VO4- | | AATGCCCCAACAGCTCTC |
| 1/2/3_verD10 | | |
| pGEXf_TCRB | 5631 | GGGCTGGCAAGCCACGTTTGGTGGATT |
| V05-1_verD10 | | CTCAGGGCGCCAGTTCTCTA |
| pGEXf_TCRB | 5632 | GGGCTGGCAAGCCACGTTTGGTGCCTA |
| V05-2_verD10 | | ATTGATTCTCAGCTCACCACGTCCATA |
| pGEXf_TCRB | 5633 | GGGCTGGCAAGCCACGTTTGGTGTCAG |
| V05-3_verD10 | | GGCGCCAGTTCCATG |
| pGEXf_TCRB | 5634 | GGGCTGGCAAGCCACGTTTGGTGTCCT |
| V05-4_verD10 | | AGATTCTCAGGTCTCCAGTTCCCTA |
| pGEXf_TCRB | 5635 | GGGCTGGCAAGCCACGTTTGGTGGAGG |
| V05-5_verD10 | | AAACTTCCCTGATCGATTCTCAGC |
| pGEXf_TCRB | 5636 | GGGCTGGCAAGCCACGTTTGGTGCAAC |
| V05-6_verD10 | | TTCCCTGATCGATTCTCAGGTCA |
| pGEXf_TCRB | 5637 | GGGCTGGCAAGCCACGTTTGGTGAGGA |
| V05-7_verD10 | | AACTTCCCTGATCAATTCTCAGGTCA |
| pGEXf_TCRB | 5638 | GGGCTGGCAAGCCACGTTTGGTGGGAA |
| V05-8_verD10 | | ACTTCCCTCCTAGATTTTCAGGTCG |
| pGEXf_TCRB | 5639 | GGGCTGGCAAGCCACGTTTGGTGCCCC |
| V06-1_verD10 | | AATGGCTACAATGTCTCCAGATT |
| pGEXf_TCRB | 5640 | GGGCTGGCAAGCCACGTTTGGTGGGAG |
| V6- | | AGGTCCCTGATGGCTACAA |
| 2/3_verD10 | | |
| pGEXf_TCRB | 5641 | GGGCTGGCAAGCCACGTTTGGTGTCCC |
| V06-4_verD10 | | TGATGGTTATAGTGTCTCCAGAGC |
| pGEXf_TCRB | 5642 | GGGCTGGCAAGCCACGTTTGGTGGGAG |
| V06-5_verD10 | | AAGTCCCCAATGGCTACAATGTC |
| pGEXf_TCRB | 5643 | GGGCTGGCAAGCCACGTTTGGTGAAAG |
| V06-6_verD10 | | GAGAAGTCCCGAATGGCTACAA |
| pGEXf_TCRB | 5644 | GGGCTGGCAAGCCACGTTTGGTGGTTC |
| V06-7_verD10 | | CCAATGGCTACAATGTCTCCAGATC |
| pGEXf_TCRB | 5645 | GGGCTGGCAAGCCACGTTTGGTGGAAG |
| V06-8_verD10 | | TCCCCAATGGCTACAATGTCTCTAGAT |
| | | T |
| pGEXf_TCRB | 5646 | GGGCTGGCAAGCCACGTTTGGTGGAGA |
| V06-9_verD10 | | AGTCCCCGATGGCTACAATGTA |
| pGEXf_TCRB | 5647 | GGGCTGGCAAGCCACGTTTGGTGGTGA |
| V7-1_verD10 | | TCGGTTCTCTGCACAGAGGT |
| pGEXf_TCRB | 5648 | GGGCTGGCAAGCCACGTTTGGTGCGCT |
| V07-2_verD10 | | TCTCTGCAGAGAGGACTGG |
| pGEXf_TCRB | 5649 | GGGCTGGCAAGCCACGTTTGGTGGGTT |
| V07-3_verD10 | | CTTTGCAGTCAGGCCTGA |
| pGEXf_TCRB | 5650 | GGGCTGGCAAGCCACGTTTGGTGCAGT |
| V07-4_verD10 | | GGTCGGTTCTCTGCAGAG |
| pGEXf_TCRB | 5651 | GGGCTGGCAAGCCACGTTTGGTGGCTC |
| V07-5_verD10 | | AGTGATCAATTCTCCACAGAGAGGT |
| pGEXf_TCRB | 5652 | GGGCTGGCAAGCCACGTTTGGTGTTCT |
| V07- | | CTGCAGAGAGGCCTGAGG |
| 6/7_verD10 | | |
| pGEXf_TCRB | 5653 | GGGCTGGCAAGCCACGTTTGGTGCCCA |
| V07-8_verD10 | | GTGATCGCTTCTTTGCAGAAA |
| pGEXf_TCRB | 5654 | GGGCTGGCAAGCCACGTTTGGTGCTGC |
| V07-9_verD10 | | AGAGAGGCCTAAGGGATCT |
| pGEXf_TCRB | 5655 | GGGCTGGCAAGCCACGTTTGGTGGAAG |
| V08-1_verD10 | | GGTACAATGTCTCTGGAAACAAACTCA |
| | | AG |
| pGEXf_TCRB | 5656 | GGGCTGGCAAGCCACGTTTGGTGGGGG |
| V08-2_verD10 | | TACTGTGTTTCTTGAAACAAGCTTGAG |
| pGEXf_TCRB | 5657 | GGGCTGGCAAGCCACGTTTGGTGCAGT |
| V09_verD10 | | TCCCTGACTTGCACTCTGAACTAAAC |
| pGEXf_TCRB | 5658 | GGGCTGGCAAGCCACGTTTGGTGACTA |
| V10-1_verD10 | | ACAAAGGAGAAGTCTCAGATGGCTACA |
| | | G |
| pGEXf_TCRB | 5659 | GGGCTGGCAAGCCACGTTTGGTGAGAT |
| V10-2_verD10 | | AAAGGAGAAGTCCCCGATGGCTA |
| pGEXf_TCRB | 5660 | GGGCTGGCAAGCCACGTTTGGTGGATA |
| V10-3_verD10 | | CTGACAAAGGAGAAGTCTCAGATGGCT |
| | | ATAG |
| pGEXf_TCRB | 5661 | GGGCTGGCAAGCCACGTTTGGTGCTAA |
| V11- | | GGATCGATTTTCTGCAGAGAGGCTC |
| 1/2/3_verD10 | | |
| pGEXf_TCRB | 5662 | GGGCTGGCAAGCCACGTTTGGTGTTGA |
| V12-1_verD10 | | TTCTCAGCACAGATGCCTGATGT |
| pGEXf_TCRB | 5663 | GGGCTGGCAAGCCACGTTTGGTGATTC |
| V12-2_verD10 | | TCAGCTGAGAGGCCTGATGG |
| pGEXf_TCRB | 5664 | GGGCTGGCAAGCCACGTTTGGTGGGAT |
| V12- | | CGATTCTCAGCTAAGATGCCTAATGC |
| 3/4_verD10 | | |
| pGEXf_TCRB | 5665 | GGGCTGGCAAGCCACGTTTGGTGCTCA |
| V12-5_verD10 | | GCAGAGATGCCTGATGCAACTTTA |
| pGEXf_TCRB | 5666 | GGGCTGGCAAGCCACGTTTGGTGCTGA |
| V13_verD10 | | TCGATTCTCAGCTCAACAGTTCAGT |
| pGEXf_TCRB | 5667 | GGGCTGGCAAGCCACGTTTGGTGTAGC |
| V14_verD10 | | TGAAAGGACTGGAGGGACGTAT |
| pGEXf_TCRB | 5668 | GGGCTGGCAAGCCACGTTTGGTGCCAG |
| V15_verD10 | | GAGGCCGAACACTTCTTTCT |
| pGEXf_TCRB | 5669 | GGGCTGGCAAGCCACGTTTGGTGGCTA |
| V16_verD10 | | AGTGCCTCCCAAATTCACCCT |
| pGEXf_TCRB | 5670 | GGGCTGGCAAGCCACGTTTGGTGCACA |
| V17_verD10 | | GCTGAAAGACCTAACGGAACGT |
| pGEXf_TCRB | 5671 | GGGCTGGCAAGCCACGTTTGGTGCTGC |
| V18_verD10 | | TGAATTTCCCAAAGAGGGCC |
| pGEXf_TCRB | 5672 | GGGCTGGCAAGCCACGTTTGGTGAGGG |
| V19_verD10 | | TACAGCGTCTCTCGGG |
| pGEXf_TCRB | 5673 | GGGCTGGCAAGCCACGTTTGGTGGCCT |
| V20_verD10 | | GACCTTGTCCACTCTGACA |
| pGEXf_TCRB | 5674 | GGGCTGGCAAGCCACGTTTGGTGATGA |
| V21_verD10 | | GCGATTTTTAGCCCAATGCTCCA |
| pGEXf_TCRB | 5675 | GGGCTGGCAAGCCACGTTTGGTGTGAA |
| V22_verD10 | | GGCTACGTGTCTGCCAAGAG |
| pGEXf_TCRB | 5676 | GGGCTGGCAAGCCACGTTTGGTGCTCA |
| V23_verD10 | | TCTCAATGCCCCAAGAACGC |
| pGEXf_TCRB | 5677 | GGGCTGGCAAGCCACGTTTGGTGAGAT |
| V24_verD10 | | CTCTGATGGATACAGTGTCTCTCGACA |
| pGEXf_TCRB | 5678 | GGGCTGGCAAGCCACGTTTGGTGAGAT |
| V25_verD10 | | CTTTCCTCTGAGTCAACAGTCTCCAGA |
| | | ATA |
| pGEXf_TCRB | 5679 | GGGCTGGCAAGCCACGTTTGGTGCACT |
| V26_verD10 | | GAAAAAGGAGATATCTCTGAGGGGTAT |
| | | CATG |
| pGEXf_TCRB | 5680 | GGGCTGGCAAGCCACGTTTGGTGGTTC |
| V27_verD10 | | CTGAAGGGTACAAAGTCTCTCGAAAAG |
| pGEXf_TCRB | 5681 | GGGCTGGCAAGCCACGTTTGGTGCTGA |
| V28_verD10 | | GGGGTACAGTGTCTCTAGAGAGA |
| pGEXf_TCRB | 5682 | GGGCTGGCAAGCCACGTTTGGTGAGCC |
| V29_verD10 | | GCCCAAACCTAACATTCTCAA |
| pGEXf_TCRB | 5683 | GGGCTGGCAAGCCACGTTTGGTGCCCA |
| V30_verD10 | | GGACCGGCAGTTCA |
| pGEXf_TCRB | 5684 | GGGCTGGCAAGCCACGTTTGGTGTTGA |
| VA_verD10 | | TTAGAGACATATCCCTATTGAAAATAT |
| | | TTCCTGGCA |
| pGEXf_TCRB | 5685 | GGGCTGGCAAGCCACGTTTGGTGAGAT |
| VB_verD10 | | GCCCTGAGTCAGCATAGTCATTCTAAC |

TABLE 7
Exemplary Tailing Primers

| | SEQ ID |
|---|---|
| Sequence | NO: |
| AAT GAT ACG GCG ACC ACC GAG ATC TAC ACC GGT CTC GGC ATT CCT | 5686 |
| GCT GAA CCG CTC TTC CGA TCT NNN NNN CAA GGT CAC CGG GAG CTG | |
| CAT GTG TCA GAG G | |

| | |
|---|---|
| AAT GAT ACG GCG ACC ACC GAG ATC TAC ACC GGT CTC GGC ATT CCT | 5687 |
| GCT GAA CCG CTC TTC CGA TCT NNN NNN GCA TAA CTC CGG GAG CTG | |
| CAT GTG TCA GAG G | |
| AAT GAT ACG GCG ACC ACC GAG ATC TAC ACC GGT CTC GGC ATT CCT | 5688 |
| GCT GAA CCG CTC TTC CGA TCT NNN NNN CTC TGA TTC CGG GAG CTG | |
| CAT GTG TCA GAG G | |
| AAT GAT ACG GCG ACC ACC GAG ATC TAC ACC GGT CTC GGC ATT CCT | 5689 |
| GCT GAA CCG CTC TTC CGA TCT NNN NNN TAC GTA CGC CGG GAG CTG | |
| CAT GTG TCA GAG G | |
| AAT GAT ACG GCG ACC ACC GAG ATC TAC ACC GGT CTC GGC ATT CCT | 5690 |
| GCT GAA CCG CTC TTC CGA TCT NNN NNN TAC GCG TTC CGG GAG CTG | |
| CAT GTG TCA GAG G | |
| AAT GAT ACG GCG ACC ACC GAG ATC TAC ACC GGT CTC GGC ATT CCT | 5691 |
| GCT GAA CCG CTC TTC CGA TCT NNN NNN CTC AGT GAC CGG GAG CTG | |
| CAT GTG TCA GAG G | |
| AAT GAT ACG GCG ACC ACC GAG ATC TAC ACC GGT CTC GGC ATT CCT | 5692 |
| GCT GAA CCG CTC TTC CGA TCT NNN NNN TCT GAT ATC CGG GAG CTG | |
| CAT GTG TCA GAG G | |
| AAT GAT ACG GCG ACC ACC GAG ATC TAC ACC GGT CTC GGC ATT CCT | 5693 |
| GCT GAA CCG CTC TTC CGA TCT NNN NNN CAT ATG CTC CGG GAG CTG | |
| CAT GTG TCA GAG G | |
| AAT GAT ACG GCG ACC ACC GAG ATC TAC ACC GGT CTC GGC ATT CCT | 5694 |
| GCT GAA CCG CTC TTC CGA TCT NNN NNN CGT AAT TAC CGG GAG CTG | |
| CAT GTG TCA GAG G | |
| AAT GAT ACG GCG ACC ACC GAG ATC TAC ACC GGT CTC GGC ATT CCT | 5695 |
| GCT GAA CCG CTC TTC CGA TCT NNN NNN ACG TAC TCC CGG GAG CTG | |
| CAT GTG TCA GAG G | |
| AAT GAT ACG GCG ACC ACC GAG ATC TAC ACC GGT CTC GGC ATT CCT | 5696 |
| GCT GAA CCG CTC TTC CGA TCT NNN NNN CTT CTA AGC CGG GAG CTG | |
| CAT GTG TCA GAG G | |
| AAT GAT ACG GCG ACC ACC GAG ATC TAC ACC GGT CTC GGC ATT CCT | 5697 |
| GCT GAA CCG CTC TTC CGA TCT NNN NNN ACT ATG ACC CGG GAG CTG | |
| CAT GTG TCA GAG G | |
| AAT GAT ACG GCG ACC ACC GAG ATC TAC ACC GGT CTC GGC ATT CCT | 5698 |
| GCT GAA CCG CTC TTC CGA TCT NNN NNN GAC GTT AAC CGG GAG CTG | |
| CAT GTG TCA GAG G | |
| AAT GAT ACG GCG ACC ACC GAG ATC TAC ACC GGT CTC GGC ATT CCT | 5699 |
| GCT GAA CCG CTC TTC CGA TCT NNN NNN ACA AGA TAC CGG GAG | |
| CTG CAT GTG TCA GAG G | |
| AAT GAT ACG GCG ACC ACC GAG ATC TAC ACC GGT CTC GGC ATT CCT | 5700 |
| GCT GAA CCG CTC TTC CGA TCT NNN NNN GAC TAA GAC CGG GAG | |
| CTG CAT GTG TCA GAG G | |
| AAT GAT ACG GCG ACC ACC GAG ATC TAC ACC GGT CTC GGC ATT CCT | 5701 |
| GCT GAA CCG CTC TTC CGA TCT NNN NNN GTG TCT ACC CGG GAG CTG | |
| CAT GTG TCA GAG G | |
| AAT GAT ACG GCG ACC ACC GAG ATC TAC ACC GGT CTC GGC ATT CCT | 5702 |
| GCT GAA CCG CTC TTC CGA TCT NNN NNN TTC ACT AGC CGG GAG CTG | |
| CAT GTG TCA GAG G | |
| AAT GAT ACG GCG ACC ACC GAG ATC TAC ACC GGT CTC GGC ATT CCT | 5703 |
| GCT GAA CCG CTC TTC CGA TCT NNN NNN AAT CGG ATC CGG GAG CTG | |
| CAT GTG TCA GAG G | |
| AAT GAT ACG GCG ACC ACC GAG ATC TAC ACC GGT CTC GGC ATT CCT | 5704 |
| GCT GAA CCG CTC TTC CGA TCT NNN NNN AGT ACC GAC CGG GAG CTG | |
| CAT GTG TCA GAG G | |
| AAT GAT ACG GCG ACC ACC GAG ATC TAC ACC GGT CTC GGC ATT CCT | 5705 |
| GCT GAA CCG CTC TTC CGA TCT NNN NNN TTG CCT CAC CGG GAG CTG | |
| CAT GTG TCA GAG G | |
| AAT GAT ACG GCG ACC ACC GAG ATC TAC ACC GGT CTC GGC ATT CCT | 5706 |
| GCT GAA CCG CTC TTC CGA TCT NNN NNN TCG TTA GCC CGG GAG CTG | |
| CAT GTG TCA GAG G | |
| AAT GAT ACG GCG ACC ACC GAG ATC TAC ACC GGT CTC GGC ATT CCT | 5707 |
| GCT GAA CCG CTC TTC CGA TCT NNN NNN TAT AGT TCC CGG GAG CTG | |
| CAT GTG TCA GAG G | |
| AAT GAT ACG GCG ACC ACC GAG ATC TAC ACC GGT CTC GGC ATT CCT | 5708 |
| GCT GAA CCG CTC TTC CGA TCT NNN NNN TGG CGT ATC CGG GAG CTG | |
| CAT GTG TCA GAG G | |
| AAT GAT ACG GCG ACC ACC GAG ATC TAC ACC GGT CTC GGC ATT CCT | 5709 |
| GCT GAA CCG CTC TTC CGA TCT NNN NNN TGG ACA TGC CGG GAG CTG | |
| CAT GTG TCA GAG G | |
| AAT GAT ACG GCG ACC ACC GAG ATC TAC ACC GGT CTC GGC ATT CCT | 5710 |
| GCT GAA CCG CTC TTC CGA TCT NNN NNN AGG TTG CTC CGG GAG CTG | |
| CAT GTG TCA GAG G | |
| AAT GAT ACG GCG ACC ACC GAG ATC TAC ACC GGT CTC GGC ATT CCT | 5711 |
| GCT GAA CCG CTC TTC CGA TCT NNN NNN ATA TGC TGC CGG GAG CTG | |
| CAT GTG TCA GAG G | |
| AAT GAT ACG GCG ACC ACC GAG ATC TAC ACC GGT CTC GGC ATT CCT | 5712 |
| GCT GAA CCG CTC TTC CGA TCT NNN NNN GTA CAG TGC CGG GAG CTG | |
| CAT GTG TCA GAG G | |
| AAT GAT ACG GCG ACC ACC GAG ATC TAC ACC GGT CTC GGC ATT CCT | 5713 |
| GCT GAA CCG CTC TTC CGA TCT NNN NNN ATC CAT GGC CGG GAG CTG | |
| CAT GTG TCA GAG G | |
| AAT GAT ACG GCG ACC ACC GAG ATC TAC ACC GGT CTC GGC ATT CCT | 5714 |
| GCT GAA CCG CTC TTC CGA TCT NNN NNN TGA TGC GAC CGG GAG CTG | |
| CAT GTG TCA GAG G | |
| AAT GAT ACG GCG ACC ACC GAG ATC TAC ACC GGT CTC GGC ATT CCT | 5715 |
| GCT GAA CCG CTC TTC CGA TCT NNN NNN GTA GCA GTC CGG GAG CTG | |
| CAT GTG TCA GAG G | |
| AAT GAT ACG GCG ACC ACC GAG ATC TAC ACC GGT CTC GGC ATT CCT | 5716 |
| GCT GAA CCG CTC TTC CGA TCT NNN NNN GGA TCA TCC CGG GAG CTG | |
| CAT GTG TCA GAG G | |
| AAT GAT ACG GCG ACC ACC GAG ATC TAC ACC GGT CTC GGC ATT CCT | 5717 |
| GCT GAA CCG CTC TTC CGA TCT NNN NNN GTG AAC GTC CGG GAG CTG | |
| CAT GTG TCA GAG G | |
| AAT GAT ACG GCG ACC ACC GAG ATC TAC ACC GGT CTC GGC ATT CCT | 5718 |
| GCT GAA CCG CTC TTC CGA TCT NNN NNN ATT AAG CGC CGG GAG CTG | |
| CAT GTG TCA GAG G | |
| AAT GAT ACG GCG ACC ACC GAG ATC TAC ACC GGT CTC GGC ATT CCT | 5719 |
| GCT GAA CCG CTC TTC CGA TCT NNN NNN TAT TGG CGC CGG GAG CTG | |
| CAT GTG TCA GAG G | |
| AAT GAT ACG GCG ACC ACC GAG ATC TAC ACC GGT CTC GGC ATT CCT | 5720 |
| GCT GAA CCG CTC TTC CGA TCT NNN NNN CGA TTA CAC CGG GAG CTG | |
| CAT GTG TCA GAG G | |
| AAT GAT ACG GCG ACC ACC GAG ATC TAC ACC GGT CTC GGC ATT CCT | 5721 |
| GCT GAA CCG CTC TTC CGA TCT NNN NNN TGT CAT CGC CGG GAG CTG | |
| CAT GTG TCA GAG G | |
| AAT GAT ACG GCG ACC ACC GAG ATC TAC ACC GGT CTC GGC ATT CCT | 5722 |
| GCT GAA CCG CTC TTC CGA TCT NNN NNN TAT CAA GTC CGG GAG CTG | |
| CAT GTG TCA GAG G | |
| AAT GAT ACG GCG ACC ACC GAG ATC TAC ACC GGT CTC GGC ATT CCT | 5723 |
| GCT GAA CCG CTC TTC CGA TCT NNN NNN AGG CTT GAC CGG GAG CTG | |
| CAT GTG TCA GAG G | |
| AAT GAT ACG GCG ACC ACC GAG ATC TAC ACC GGT CTC GGC ATT CCT | 5724 |
| GCT GAA CCG CTC TTC CGA TCT NNN NNN GAT AAC CAC CGG GAG CTG | |
| CAT GTG TCA GAG G | |
| AAT GAT ACG GCG ACC ACC GAG ATC TAC ACC GGT CTC GGC ATT CCT | 5725 |
| GCT GAA CCG CTC TTC CGA TCT NNN NNN AAT CCT GCC CGG GAG CTG | |
| CAT GTG TCA GAG G | |
| AAT GAT ACG GCG ACC ACC GAG ATC TAC ACC GGT CTC GGC ATT CCT | 5726 |
| GCT GAA CCG CTC TTC CGA TCT NNN NNN GTT ATA TCC CGG GAG CTG | |
| CAT GTG TCA GAG G | |
| AAT GAT ACG GCG ACC ACC GAG ATC TAC ACC GGT CTC GGC ATT CCT | 5727 |
| GCT GAA CCG CTC TTC CGA TCT NNN NNN ACA CAC GTC CGG GAG CTG | |
| CAT GTG TCA GAG G | |
| AAT GAT ACG GCG ACC ACC GAG ATC TAC ACC GGT CTC GGC ATT CCT | 5728 |
| GCT GAA CCG CTC TTC CGA TCT NNN NNN ATA CGA CTC CGG GAG CTG | |
| CAT GTG TCA GAG G | |
| AAT GAT ACG GCG ACC ACC GAG ATC TAC ACC GGT CTC GGC ATT CCT | 5729 |
| GCT GAA CCG CTC TTC CGA TCT NNN NNN ATC TTC GTC CGG GAG CTG | |
| CAT GTG TCA GAG G | |
| AAT GAT ACG GCG ACC ACC GAG ATC TAC ACC GGT CTC GGC ATT CCT | 5730 |
| GCT GAA CCG CTC TTC CGA TCT NNN NNN ACA TGT ATC CGG GAG CTG | |
| CAT GTG TCA GAG G | |
| AAT GAT ACG GCG ACC ACC GAG ATC TAC ACC GGT CTC GGC ATT CCT | 5731 |
| GCT GAA CCG CTC TTC CGA TCT NNN NNN TCC ACA GTC CGG GAG CTG | |
| CAT GTG TCA GAG G | |
| AAT GAT ACG GCG ACC ACC GAG ATC TAC ACC GGT CTC GGC ATT CCT | 5732 |
| GCT GAA CCG CTC TTC CGA TCT NNN NNN CAG TCT GTC CGG GAG CTG | |
| CAT GTG TCA GAG G | |
| AAT GAT ACG GCG ACC ACC GAG ATC TAC ACC GGT CTC GGC ATT CCT | 5733 |
| GCT GAA CCG CTC TTC CGA TCT NNN NNN TCC ATG TGC CGG GAG CTG | |
| CAT GTG TCA GAG G | |
| AAT GAT ACG GCG ACC ACC GAG ATC TAC ACC GGT CTC GGC ATT CCT | 5734 |
| GCT GAA CCG CTC TTC CGA TCT NNN NNN TCA CTG CAC CGG GAG CTG | |
| CAT GTG TCA GAG G | |
| AAT GAT ACG GCG ACC ACC GAG ATC TAC ACC GGT CTC GGC ATT CCT | 5735 |
| GCT GAA CCG CTC TTC CGA TCT NNN NNN ATG GTC AAC CGG GAG CTG | |
| CAT GTG TCA GAG G | |
| AAT GAT ACG GCG ACC ACC GAG ATC TAC ACC GGT CTC GGC ATT CCT | 5736 |
| GCT GAA CCG CTC TTC CGA TCT NNN NNN CAA GTC ACC CGG GAG CTG | |
| CAT GTG TCA GAG G | |
| AAT GAT ACG GCG ACC ACC GAG ATC TAC ACC GGT CTC GGC ATT CCT | 5737 |
| GCT GAA CCG CTC TTC CGA TCT NNN NNN TAG ACG GAC CGG GAG | |
| CTG CAT GTG TCA GAG G | |
| AAT GAT ACG GCG ACC ACC GAG ATC TAC ACC GGT CTC GGC ATT CCT | 5738 |
| GCT GAA CCG CTC TTC CGA TCT NNN NNN CAG CTC TTC CGG GAG CTG | |
| CAT GTG TCA GAG G | |
| AAT GAT ACG GCG ACC ACC GAG ATC TAC ACC GGT CTC GGC ATT CCT | 5739 |
| GCT GAA CCG CTC TTC CGA TCT NNN NNN GAG CGA TAC CGG GAG | |
| CTG CAT GTG TCA GAG G | |
| AAT GAT ACG GCG ACC ACC GAG ATC TAC ACC GGT CTC GGC ATT CCT | 5740 |
| GCT GAA CCG CTC TTC CGA TCT NNN NNN CTC GAG AAC CGG GAG CTG | |
| CAT GTG TCA GAG G | |
| AAT GAT ACG GCG ACC ACC GAG ATC TAC ACC GGT CTC GGC ATT CCT | 5741 |
| GCT GAA CCG CTC TTC CGA TCT NNN NNN ATG ACA CCC CGG GAG CTG | |
| CAT GTG TCA GAG G | |
| AAT GAT ACG GCG ACC ACC GAG ATC TAC ACC GGT CTC GGC ATT CCT | 5742 |
| GCT GAA CCG CTC TTC CGA TCT NNN NNN CTT CAC GAC CGG GAG CTG | |
| CAT GTG TCA GAG G | |
| AAT GAT ACG GCG ACC ACC GAG ATC TAC ACC GGT CTC GGC ATT CCT | 5743 |
| GCT GAA CCG CTC TTC CGA TCT NNN NNN CTA TAA GGC CGG GAG CTG | |
| CAT GTG TCA GAG G | |
| AAT GAT ACG GCG ACC ACC GAG ATC TAC ACC GGT CTC GGC ATT CCT | 5744 |
| GCT GAA CCG CTC TTC CGA TCT NNN NNN CGT AGA GTC CGG GAG CTG | |
| CAT GTG TCA GAG G | |
| AAT GAT ACG GCG ACC ACC GAG ATC TAC ACC GGT CTC GGC ATT CCT | 5745 |
| GCT GAA CCG CTC TTC CGA TCT NNN NNN ATA GAT ACC CGG GAG CTG | |
| CAT GTG TCA GAG G | |
| AAT GAT ACG GCG ACC ACC GAG ATC TAC ACC GGT CTC GGC ATT CCT | 5746 |
| GCT GAA CCG CTC TTC CGA TCT NNN NNN TCG TCG ATC CGG GAG CTG | |
| CAT GTG TCA GAG G | |
| AAT GAT ACG GCG ACC ACC GAG ATC TAC ACC GGT CTC GGC ATT CCT | 5747 |
| GCT GAA CCG CTC TTC CGA TCT NNN NNN TAA GAA TCC CGG GAG CTG | |
| CAT GTG TCA GAG G | |
| AAT GAT ACG GCG ACC ACC GAG ATC TAC ACC GGT CTC GGC ATT CCT | 5748 |
| GCT GAA CCG CTC TTC CGA TCT NNN NNN AAT GAC AGC CGG GAG | |
| CTG CAT GTG TCA GAG G | |
| AAT GAT ACG GCG ACC ACC GAG ATC TAC ACC GGT CTC GGC ATT CCT | 5749 |
| GCT GAA CCG CTC TTC CGA TCT NNN NNN AGC TAG TGC CGG GAG CTG | |
| CAT GTG TCA GAG G | |
| AAT GAT ACG GCG ACC ACC GAG ATC TAC ACC GGT CTC GGC ATT CCT | 5750 |
| GCT GAA CCG CTC TTC CGA TCT NNN NNN TGA GAC CTC CGG GAG CTG | |
| CAT GTG TCA GAG G | |
| AAT GAT ACG GCG ACC ACC GAG ATC TAC ACC GGT CTC GGC ATT CCT | 5751 |
| GCT GAA CCG CTC TTC CGA TCT NNN NNN AGC GTA ATC CGG GAG CTG | |
| CAT GTG TCA GAG G | |
| AAT GAT ACG GCG ACC ACC GAG ATC TAC ACC GGT CTC GGC ATT CCT | 5752 |
| GCT GAA CCG CTC TTC CGA TCT NNN NNN TAA CCA AGC CGG GAG CTG | |
| CAT GTG TCA GAG G | |
| AAT GAT ACG GCG ACC ACC GAG ATC TAC ACC GGT CTC GGC ATT CCT | 5753 |
| GCT GAA CCG CTC TTC CGA TCT NNN NNN GAT GGC TTC CGG GAG CTG | |
| CAT GTG TCA GAG G | |
| AAT GAT ACG GCG ACC ACC GAG ATC TAC ACC GGT CTC GGC ATT CCT | 5754 |
| GCT GAA CCG CTC TTC CGA TCT NNN NNN GCA TCT GAC CGG GAG CTG | |
| CAT GTG TCA GAG G | |
| AAT GAT ACG GCG ACC ACC GAG ATC TAC ACC GGT CTC GGC ATT CCT | 5755 |
| GCT GAA CCG CTC TTC CGA TCT NNN NNN TTC CGG TAC CGG GAG CTG | |
| CAT GTG TCA GAG G | |
| AAT GAT ACG GCG ACC ACC GAG ATC TAC ACC GGT CTC GGC ATT CCT | 5756 |
| GCT GAA CCG CTC TTC CGA TCT NNN NNN GAC ACT CTC CGG GAG CTG | |
| CAT GTG TCA GAG G | |
| AAT GAT ACG GCG ACC ACC GAG ATC TAC ACC GGT CTC GGC ATT CCT | 5757 |
| GCT GAA CCG CTC TTC CGA TCT NNN NNN TTA AGC ATC CGG GAG CTG | |
| CAT GTG TCA GAG G | |
| AAT GAT ACG GCG ACC ACC GAG ATC TAC ACC GGT CTC GGC ATT CCT | 5758 |
| GCT GAA CCG CTC TTC CGA TCT NNN NNN TGC TAC ACC CGG GAG CTG | |
| CAT GTG TCA GAG G | |
| AAT GAT ACG GCG ACC ACC GAG ATC TAC ACC GGT CTC GGC ATT CCT | 5759 |
| GCT GAA CCG CTC TTC CGA TCT NNN NNN TCA GCT TGC CGG GAG CTG | |
| CAT GTG TCA GAG G | |
| AAT GAT ACG GCG ACC ACC GAG ATC TAC ACC GGT CTC GGC ATT CCT | 5760 |
| GCT GAA CCG CTC TTC CGA TCT NNN NNN CAT GTA GAC CGG GAG CTG | |
| CAT GTG TCA GAG G | |
| AAT GAT ACG GCG ACC ACC GAG ATC TAC ACC GGT CTC GGC ATT CCT | 5761 |
| GCT GAA CCG CTC TTC CGA TCT NNN NNN TTC GGA ACC CGG GAG CTG | |
| CAT GTG TCA GAG G | |
| AAT GAT ACG GCG ACC ACC GAG ATC TAC ACC GGT CTC GGC ATT CCT | 5762 |
| GCT GAA CCG CTC TTC CGA TCT NNN NNN GCA ATT CGC CGG GAG CTG | |
| CAT GTG TCA GAG G | |
| AAT GAT ACG GCG ACC ACC GAG ATC TAC ACC GGT CTC GGC ATT CCT | 5763 |
| GCT GAA CCG CTC TTC CGA TCT NNN NNN CAA GAG GTC CGG GAG | |
| CTG CAT GTG TCA GAG G | |
| AAT GAT ACG GCG ACC ACC GAG ATC TAC ACC GGT CTC GGC ATT CCT | 5764 |
| GCT GAA CCG CTC TTC CGA TCT NNN NNN TCG ATT AAC CGG GAG CTG | |
| CAT GTG TCA GAG G | |
| AAT GAT ACG GCG ACC ACC GAG ATC TAC ACC GGT CTC GGC ATT CCT | 5765 |
| GCT GAA CCG CTC TTC CGA TCT NNN NNN GAA TGG ACC CGG GAG | |
| CTG CAT GTG TCA GAG G | |
| AAT GAT ACG GCG ACC ACC GAG ATC TAC ACC GGT CTC GGC ATT CCT | 5766 |
| GCT GAA CCG CTC TTC CGA TCT NNN NNN AGA ATC AGC CGG GAG | |
| CTG CAT GTG TCA GAG G | |
| AAT GAT ACG GCG ACC ACC GAG ATC TAC ACC GGT CTC GGC ATT CCT | 5767 |
| GCT GAA CCG CTC TTC CGA TCT NNN NNN AAC TGC CAC CGG GAG CTG | |
| CAT GTG TCA GAG G | |
| AAT GAT ACG GCG ACC ACC GAG ATC TAC ACC GGT CTC GGC ATT CCT | 5768 |
| GCT GAA CCG CTC TTC CGA TCT NNN NNN AAG TAA CGC CGG GAG | |
| CTG CAT GTG TCA GAG G | |
| AAT GAT ACG GCG ACC ACC GAG ATC TAC ACC GGT CTC GGC ATT CCT | 5769 |
| GCT GAA CCG CTC TTC CGA TCT NNN NNN ACT CAA TGC CGG GAG CTG | |
| CAT GTG TCA GAG G | |
| AAT GAT ACG GCG ACC ACC GAG ATC TAC ACC GGT CTC GGC ATT CCT | 5770 |
| GCT GAA CCG CTC TTC CGA TCT NNN NNN CCT AGT AGC CGG GAG CTG | |
| CAT GTG TCA GAG G | |
| AAT GAT ACG GCG ACC ACC GAG ATC TAC ACC GGT CTC GGC ATT CCT | 5771 |
| GCT GAA CCG CTC TTC CGA TCT NNN NNN CTG ACG TTC CGG GAG CTG | |
| CAT GTG TCA GAG G | |
| AAT GAT ACG GCG ACC ACC GAG ATC TAC ACC GGT CTC GGC ATT CCT | 5772 |
| GCT GAA CCG CTC TTC CGA TCT NNN NNN TGC AGA CAC CGG GAG CTG | |
| CAT GTG TCA GAG G | |
| AAT GAT ACG GCG ACC ACC GAG ATC TAC ACC GGT CTC GGC ATT CCT | 5773 |
| GCT GAA CCG CTC TTC CGA TCT NNN NNN AGT TGA CCC CGG GAG CTG | |
| CAT GTG TCA GAG G | |
| AAT GAT ACG GCG ACC ACC GAG ATC TAC ACC GGT CTC GGC ATT CCT | 5774 |
| GCT GAA CCG CTC TTC CGA TCT NNN NNN GTC TCC TAC CGG GAG CTG | |
| CAT GTG TCA GAG G | |
| AAT GAT ACG GCG ACC ACC GAG ATC TAC ACC GGT CTC GGC ATT CCT | 5775 |
| GCT GAA CCG CTC TTC CGA TCT NNN NNN CTG CAA TCC CGG GAG CTG | |
| CAT GTG TCA GAG G | |
| AAT GAT ACG GCG ACC ACC GAG ATC TAC ACC GGT CTC GGC ATT CCT | 5776 |
| GCT GAA CCG CTC TTC CGA TCT NNN NNN TGA GCG AAC CGG GAG | |
| CTG CAT GTG TCA GAG G | |
| AAT GAT ACG GCG ACC ACC GAG ATC TAC ACC GGT CTC GGC ATT CCT | 5777 |
| GCT GAA CCG CTC TTC CGA TCT NNN NNN TTG GAC TGC CGG GAG CTG | |
| CAT GTG TCA GAG G | |
| AAT GAT ACG GCG ACC ACC GAG ATC TAC ACC GGT CTC GGC ATT CCT | 5778 |
| GCT GAA CCG CTC TTC CGA TCT NNN NNN AGC AAT CCC CGG GAG CTG | |
| CAT GTG TCA GAG G | |
| AAT GAT ACG GCG ACC ACC GAG ATC TAC ACC GGT CTC GGC ATT CCT | 5779 |
| GCT GAA CCG CTC TTC CGA TCT NNN NNN CGA ACT ACC CGG GAG CTG | |
| CAT GTG TCA GAG G | |
| AAT GAT ACG GCG ACC ACC GAG ATC TAC ACC GGT CTC GGC ATT CCT | |
| GCT GAA CCG CTC TTC CGA TCT NNN NNN TTA ATG GCC CGG GAG CTG | 5780 |
| CAT GTG TCA GAG G | |
| AAT GAT ACG GCG ACC ACC GAG ATC TAC ACC GGT CTC GGC ATT CCT | 5781 |
| GCT GAA CCG CTC TTC CGA TCT NNN NNN GCT TAG TAC CGG GAG CTG | |
| CAT GTG TCA GAG G | |
| CAA GCA GAA GAC GGC ATA CGA GAT ACA CTC TTT CCC TAC ACG | 5782 |
| ACG CTC TTC CGA TCT CAA GGT CAN NNN NNG GGC TGG CAA GCC | |
| ACG TTT GGT G | |
| CAA GCA GAA GAC GGC ATA CGA GAT ACA CTC TTT CCC TAC ACG | 5783 |
| ACG CTC TTC CGA TCT GCA TAA CTN NNN NNG GGC TGG CAA GCC ACG | |
| TTT GGT G | |
| CAA GCA GAA GAC GGC ATA CGA GAT ACA CTC TTT CCC TAC ACG | 5784 |
| ACG CTC TTC CGA TCT CTC TGA TTN NNN NNG GGC TGG CAA GCC ACG | |
| TTT GGT G | |
| CAA GCA GAA GAC GGC ATA CGA GAT ACA CTC TTT CCC TAC ACG | 5785 |
| ACG CTC TTC CGA TCT TAC GTA CGN NNN NNG GGC TGG CAA GCC ACG | |
| TTT GGT G | |
| CAA GCA GAA GAC GGC ATA CGA GAT ACA CTC TTT CCC TAC ACG | 5786 |
| ACG CTC TTC CGA TCT TAC GCG TTN NNN NNG GGC TGG CAA GCC ACG | |
| TTT GGT G | |
| CAA GCA GAA GAC GGC ATA CGA GAT ACA CTC TTT CCC TAC ACG | 5787 |
| ACG CTC TTC CGA TCT CTC AGT GAN NNN NNG GGC TGG CAA GCC ACG | |
| TTT GGT G | |
| CAA GCA GAA GAC GGC ATA CGA GAT ACA CTC TTT CCC TAC ACG | 5788 |
| ACG CTC TTC CGA TCT TCT GAT ATN NNN NNG GGC TGG CAA GCC ACG | |
| TTT GGT G | |
| CAA GCA GAA GAC GGC ATA CGA GAT ACA CTC TTT CCC TAC ACG | 5789 |
| ACG CTC TTC CGA TCT CAT ATG CTN NNN NNG GGC TGG CAA GCC ACG | |
| TTT GGT G | |
| CAA GCA GAA GAC GGC ATA CGA GAT ACA CTC TTT CCC TAC ACG | 5790 |
| ACG CTC TTC CGA TCT CGT AAT TAN NNN NNG GGC TGG CAA GCC ACG | |
| TTT GGT G | |
| CAA GCA GAA GAC GGC ATA CGA GAT ACA CTC TTT CCC TAC ACG | 5791 |
| ACG CTC TTC CGA TCT ACG TAC TCN NNN NNG GGC TGG CAA GCC ACG | |
| TTT GGT G | |
| CAA GCA GAA GAC GGC ATA CGA GAT ACA CTC TTT CCC TAC ACG | 5792 |
| ACG CTC TTC CGA TCT CTT CTA AGN NNN NNG GGC TGG CAA GCC ACG | |
| TTT GGT G | |
| CAA GCA GAA GAC GGC ATA CGA GAT ACA CTC TTT CCC TAC ACG | 5793 |
| ACG CTC TTC CGA TCT ACT ATG ACN NNN NNG GGC TGG CAA GCC ACG | |
| TTT GGT G | |
| CAA GCA GAA GAC GGC ATA CGA GAT ACA CTC TTT CCC TAC ACG | 5794 |
| ACG CTC TTC CGA TCT GAC GTT AAN NNN NNG GGC TGG CAA GCC | |
| ACG TTT GGT G | |
| CAA GCA GAA GAC GGC ATA CGA GAT ACA CTC TTT CCC TAC ACG | 5795 |
| ACG CTC TTC CGA TCT ACA AGA TAN NNN NNG GGC TGG CAA GCC | |
| ACG TTT GGT G | |
| CAA GCA GAA GAC GGC ATA CGA GAT ACA CTC TTT CCC TAC ACG | 5796 |
| ACG CTC TTC CGA TCT GAC TAA GAN NNN NNG GGC TGG CAA GCC | |
| ACG TTT GGT G | |
| CAA GCA GAA GAC GGC ATA CGA GAT ACA CTC TTT CCC TAC ACG | 5797 |
| ACG CTC TTC CGA TCT GTG TCT ACN NNN NNG GGC TGG CAA GCC ACG | |
| TTT GGT G | |
| CAA GCA GAA GAC GGC ATA CGA GAT ACA CTC TTT CCC TAC ACG | 5798 |
| ACG CTC TTC CGA TCT TTC ACT AGN NNN NNG GGC TGG CAA GCC ACG | |
| TTT GGT G | |
| CAA GCA GAA GAC GGC ATA CGA GAT ACA CTC TTT CCC TAC ACG | 5799 |
| ACG CTC TTC CGA TCT AAT CGG ATN NNN NNG GGC TGG CAA GCC | |
| ACG TTT GGT G | |
| CAA GCA GAA GAC GGC ATA CGA GAT ACA CTC TTT CCC TAC ACG | 5800 |
| ACG CTC TTC CGA TCT AGT ACC GAN NNN NNG GGC TGG CAA GCC | |
| ACG TTT GGT G | |
| CAA GCA GAA GAC GGC ATA CGA GAT ACA CTC TTT CCC TAC ACG | 5801 |
| ACG CTC TTC CGA TCT TTG CCT CAN NNN NNG GGC TGG CAA GCC ACG | |
| TTT GGT G | |
| CAA GCA GAA GAC GGC ATA CGA GAT ACA CTC TTT CCC TAC ACG | 5802 |
| ACG CTC TTC CGA TCT TCG TTA GCN NNN NNG GGC TGG CAA GCC ACG | |
| TTT GGT G | |
| CAA GCA GAA GAC GGC ATA CGA GAT ACA CTC TTT CCC TAC ACG | 5803 |
| ACG CTC TTC CGA TCT TAT AGT TCN NNN NNG GGC TGG CAA GCC ACG | |
| TTT GGT G | |
| CAA GCA GAA GAC GGC ATA CGA GAT ACA CTC TTT CCC TAC ACG | 5804 |
| ACG CTC TTC CGA TCT TGG CGT ATN NNN NNG GGC TGG CAA GCC ACG | |
| TTT GGT G | |
| CAA GCA GAA GAC GGC ATA CGA GAT ACA CTC TTT CCC TAC ACG | 5805 |
| ACG CTC TTC CGA TCT TGG ACA TGN NNN NNG GGC TGG CAA GCC | |
| ACG TTT GGT G | |
| CAA GCA GAA GAC GGC ATA CGA GAT ACA CTC TTT CCC TAC ACG | 5806 |
| ACG CTC TTC CGA TCT AGG TTG CTN NNN NNG GGC TGG CAA GCC ACG | |
| TTT GGT G | |
| CAA GCA GAA GAC GGC ATA CGA GAT ACA CTC TTT CCC TAC ACG | 5807 |
| ACG CTC TTC CGA TCT ATA TGC TGN NNN NNG GGC TGG CAA GCC ACG | |
| TTT GGT G | |
| CAA GCA GAA GAC GGC ATA CGA GAT ACA CTC TTT CCC TAC ACG | 5808 |
| ACG CTC TTC CGA TCT GTA CAG TGN NNN NNG GGC TGG CAA GCC | |
| ACG TTT GGT G | |
| CAA GCA GAA GAC GGC ATA CGA GAT ACA CTC TTT CCC TAC ACG | 5809 |
| ACG CTC TTC CGA TCT ATC CAT GGN NNN NNG GGC TGG CAA GCC ACG | |
| TTT GGT G | |
| CAA GCA GAA GAC GGC ATA CGA GAT ACA CTC TTT CCC TAC ACG | 5810 |
| ACG CTC TTC CGA TCT TGA TGC GAN NNN NNG GGC TGG CAA GCC | |
| ACG TTT GGT G | |
| CAA GCA GAA GAC GGC ATA CGA GAT ACA CTC TTT CCC TAC ACG | 5811 |
| ACG CTC TTC CGA TCT GTA GCA GTN NNN NNG GGC TGG CAA GCC | |
| ACG TTT GGT G | |
| CAA GCA GAA GAC GGC ATA CGA GAT ACA CTC TTT CCC TAC ACG | 5812 |
| ACG CTC TTC CGA TCT GGA TCA TCN NNN NNG GGC TGG CAA GCC ACG | |
| TTT GGT G | |
| CAA GCA GAA GAC GGC ATA CGA GAT ACA CTC TTT CCC TAC ACG | 5813 |
| ACG CTC TTC CGA TCT GTG AAC GTN NNN NNG GGC TGG CAA GCC | |
| ACG TTT GGT G | |
| CAA GCA GAA GAC GGC ATA CGA GAT ACA CTC TTT CCC TAC ACG | 5814 |
| ACG CTC TTC CGA TCT ATT AAG CGN NNN NNG GGC TGG CAA GCC | |
| ACG TTT GGT G | |
| CAA GCA GAA GAC GGC ATA CGA GAT ACA CTC TTT CCC TAC ACG | 5815 |
| ACG CTC TTC CGA TCT TAT TGG CGN NNN NNG GGC TGG CAA GCC ACG | |
| TTT GGT G | |
| CAA GCA GAA GAC GGC ATA CGA GAT ACA CTC TTT CCC TAC ACG | 5816 |
| ACG CTC TTC CGA TCT CGA TTA CAN NNN NNG GGC TGG CAA GCC ACG | |
| TTT GGT G | |
| CAA GCA GAA GAC GGC ATA CGA GAT ACA CTC TTT CCC TAC ACG | 5817 |
| ACG CTC TTC CGA TCT TGT CAT CGN NNN NNG GGC TGG CAA GCC ACG | |
| TTT GGT G | |
| CAA GCA GAA GAC GGC ATA CGA GAT ACA CTC TTT CCC TAC ACG | 5818 |
| ACG CTC TTC CGA TCT TAT CAA GTN NNN NNG GGC TGG CAA GCC ACG | |
| TTT GGT G | |
| CAA GCA GAA GAC GGC ATA CGA GAT ACA CTC TTT CCC TAC ACG | 5819 |
| ACG CTC TTC CGA TCT AGG CTT GAN NNN NNG GGC TGG CAA GCC | |
| ACG TTT GGT G | |
| CAA GCA GAA GAC GGC ATA CGA GAT ACA CTC TTT CCC TAC ACG | 5820 |
| ACG CTC TTC CGA TCT GAT AAC CAN NNN NNG GGC TGG CAA GCC | |
| ACG TTT GGT G | |
| CAA GCA GAA GAC GGC ATA CGA GAT ACA CTC TTT CCC TAC ACG | 5821 |
| ACG CTC TTC CGA TCT AAT CCT GCN NNN NNG GGC TGG CAA GCC ACG | |
| TTT GGT G | |
| CAA GCA GAA GAC GGC ATA CGA GAT ACA CTC TTT CCC TAC ACG | 5822 |
| ACG CTC TTC CGA TCT GTT ATA TCN NNN NNG GGC TGG CAA GCC ACG | |
| TTT GGT G | |
| CAA GCA GAA GAC GGC ATA CGA GAT ACA CTC TTT CCC TAC ACG5823 | |
| ACG CTC TTC CGA TCT ACA CAC GTN NNN NNG GGC TGG CAA GCC | |
| ACG TTT GGT G | |
| CAA GCA GAA GAC GGC ATA CGA GAT ACA CTC TTT CCC TAC ACG | 5824 |
| ACG CTC TTC CGA TCT ATA CGA CTN NNN NNG GGC TGG CAA GCC ACG | |
| TTT GGT G | |
| CAA GCA GAA GAC GGC ATA CGA GAT ACA CTC TTT CCC TAC ACG | 5825 |
| ACG CTC TTC CGA TCT ATC TTC GTN NNN NNG GGC TGG CAA GCC ACG | |
| TTT GGT G | |
| CAA GCA GAA GAC GGC ATA CGA GAT ACA CTC TTT CCC TAC ACG | 5826 |
| ACG CTC TTC CGA TCT ACA TGT ATN NNN NNG GGC TGG CAA GCC ACG | |
| TTT GGT G | |
| CAA GCA GAA GAC GGC ATA CGA GAT ACA CTC TTT CCC TAC ACG | 5827 |
| ACG CTC TTC CGA TCT TCC ACA GTN NNN NNG GGC TGG CAA GCC ACG | |
| TTT GGT G | |
| CAA GCA GAA GAC GGC ATA CGA GAT ACA CTC TTT CCC TAC ACG | 5828 |
| ACG CTC TTC CGA TCT CAG TCT GTN NNN NNG GGC TGG CAA GCC ACG | |
| TTT GGT G | |
| CAA GCA GAA GAC GGC ATA CGA GAT ACA CTC TTT CCC TAC ACG | 5829 |
| ACG CTC TTC CGA TCT TCC ATG TGN NNN NNG GGC TGG CAA GCC ACG | |
| TTT GGT G | |
| CAA GCA GAA GAC GGC ATA CGA GAT ACA CTC TTT CCC TAC ACG | 5830 |
| ACG CTC TTC CGA TCT TCA CTG CAN NNN NNG GGC TGG CAA GCC ACG | |
| TTT GGT G | |
| CAA GCA GAA GAC GGC ATA CGA GAT ACA CTC TTT CCC TAC ACG | 5831 |
| ACG CTC TTC CGA TCT ATG GTC AAN NNN NNG GGC TGG CAA GCC | |
| ACG TTT GGT G | |
| CAA GCA GAA GAC GGC ATA CGA GAT ACA CTC TTT CCC TAC ACG | 5832 |
| ACG CTC TTC CGA TCT CAA GTC ACN NNN NNG GGC TGG CAA GCC | |
| ACG TTT GGT G | |
| CAA GCA GAA GAC GGC ATA CGA GAT ACA CTC TTT CCC TAC ACG | 5833 |
| ACG CTC TTC CGA TCT TAG ACG GAN NNN NNG GGC TGG CAA GCC | |
| ACG TTT GGT G | |
| CAA GCA GAA GAC GGC ATA CGA GAT ACA CTC TTT CCC TAC ACG | 5834 |
| ACG CTC TTC CGA TCT CAG CTC TTN NNN NNG GGC TGG CAA GCC ACG | |
| TTT GGT G | |
| CAA GCA GAA GAC GGC ATA CGA GAT ACA CTC TTT CCC TAC ACG | 5835 |
| ACG CTC TTC CGA TCT GAG CGA TAN NNN NNG GGC TGG CAA GCC | |
| ACG TTT GGT G | |
| CAA GCA GAA GAC GGC ATA CGA GAT ACA CTC TTT CCC TAC ACG | 5836 |
| ACG CTC TTC CGA TCT CTC GAG AAN NNN NNG GGC TGG CAA GCC | |
| ACG TTT GGT G | |
| CAA GCA GAA GAC GGC ATA CGA GAT ACA CTC TTT CCC TAC ACG | 5837 |
| ACG CTC TTC CGA TCT ATG ACA CCN NNN NNG GGC TGG CAA GCC | |
| ACG TTT GGT G | |
| CAA GCA GAA GAC GGC ATA CGA GAT ACA CTC TTT CCC TAC ACG | 5838 |
| ACG CTC TTC CGA TCT CTT CAC GAN NNN NNG GGC TGG CAA GCC ACG | |
| TTT GGT G | |
| CAA GCA GAA GAC GGC ATA CGA GAT ACA CTC TTT CCC TAC ACG | 5839 |
| ACG CTC TTC CGA TCT CTA TAA GGN NNN NNG GGC TGG CAA GCC | |
| ACG TTT GGT G | |
| CAA GCA GAA GAC GGC ATA CGA GAT ACA CTC TTT CCC TAC ACG | 5840 |
| ACG CTC TTC CGA TCT CGT AGA GTN NNN NNG GGC TGG CAA GCC | |
| ACG TTT GGT G | |
| CAA GCA GAA GAC GGC ATA CGA GAT ACA CTC TTT CCC TAC ACG | 5841 |
| ACG CTC TTC CGA TCT ATA GAT ACN NNN NNG GGC TGG CAA GCC | |
| ACG TTT GGT G | |
| CAA GCA GAA GAC GGC ATA CGA GAT ACA CTC TTT CCC TAC ACG | 5842 |
| ACG CTC TTC CGA TCT TCG TCG ATN NNN NNG GGC TGG CAA GCC ACG | |
| TTT GGT G | |
| CAA GCA GAA GAC GGC ATA CGA GAT ACA CTC TTT CCC TAC ACG | 5843 |
| ACG CTC TTC CGA TCT TAA GAA TCN NNN NNG GGC TGG CAA GCC | |
| ACG TTT GGT G | |
| CAA GCA GAA GAC GGC ATA CGA GAT ACA CTC TTT CCC TAC ACG | 5844 |
| ACG CTC TTC CGA TCT AAT GAC AGN NNN NNG GGC TGG CAA GCC | |
| ACG TTT GGT G | |
| CAA GCA GAA GAC GGC ATA CGA GAT ACA CTC TTT CCC TAC ACG | 5845 |
| ACG CTC TTC CGA TCT AGC TAG TGN NNN NNG GGC TGG CAA GCC | |
| ACG TTT GGT G | |
| CAA GCA GAA GAC GGC ATA CGA GAT ACA CTC TTT CCC TAC ACG | 5846 |
| ACG CTC TTC CGA TCT TGA GAC CTN NNN NNG GGC TGG CAA GCC ACG | |
| TTT GGT G | |
| CAA GCA GAA GAC GGC ATA CGA GAT ACA CTC TTT CCC TAC ACG | 5847 |
| ACG CTC TTC CGA TCT AGC GTA ATN NNN NNG GGC TGG CAA GCC | |
| ACG TTT GGT G | |
| CAA GCA GAA GAC GGC ATA CGA GAT ACA CTC TTT CCC TAC ACG | 5848 |
| ACG CTC TTC CGA TCT TAA CCA AGN NNN NNG GGC TGG CAA GCC | |
| ACG TTT GGT G | |
| CAA GCA GAA GAC GGC ATA CGA GAT ACA CTC TTT CCC TAC ACG | 5849 |
| ACG CTC TTC CGA TCT GAT GGC TTN NNN NNG GGC TGG CAA GCC ACG | |
| TTT GGT G | |
| CAA GCA GAA GAC GGC ATA CGA GAT ACA CTC TTT CCC TAC ACG | 5850 |
| ACG CTC TTC CGA TCT GCA TCT GAN NNN NNG GGC TGG CAA GCC ACG | |
| TTT GGT G | |
| CAA GCA GAA GAC GGC ATA CGA GAT ACA CTC TTT CCC TAC ACG | 5851 |
| ACG CTC TTC CGA TCT TTC CGG TAN NNN NNG GGC TGG CAA GCC ACG | |
| TTT GGT G | |
| CAA GCA GAA GAC GGC ATA CGA GAT ACA CTC TTT CCC TAC ACG | 5852 |
| ACG CTC TTC CGA TCT GAC ACT CTN NNN NNG GGC TGG CAA GCC ACG | |
| TTT GGT G | |
| CAA GCA GAA GAC GGC ATA CGA GAT ACA CTC TTT CCC TAC ACG | 5853 |
| ACG CTC TTC CGA TCT TTA AGC ATN NNN NNG GGC TGG CAA GCC ACG | |
| TTT GGT G | |
| CAA GCA GAA GAC GGC ATA CGA GAT ACA CTC TTT CCC TAC ACG | 5854 |
| ACG CTC TTC CGA TCT TGC TAC ACN NNN NNG GGC TGG CAA GCC ACG | |
| TTT GGT G | |
| CAA GCA GAA GAC GGC ATA CGA GAT ACA CTC TTT CCC TAC ACG | 5855 |
| ACG CTC TTC CGA TCT TCA GCT TGN NNN NNG GGC TGG CAA GCC ACG | |
| TTT GGT G | |
| CAA GCA GAA GAC GGC ATA CGA GAT ACA CTC TTT CCC TAC ACG | 5856 |
| ACG CTC TTC CGA TCT CAT GTA GAN NNN NNG GGC TGG CAA GCC | |
| ACG TTT GGT G | |
| CAA GCA GAA GAC GGC ATA CGA GAT ACA CTC TTT CCC TAC ACG | 5857 |
| ACG CTC TTC CGA TCT TTC GGA ACN NNN NNG GGC TGG CAA GCC ACG | |
| TTT GGT G | |
| CAA GCA GAA GAC GGC ATA CGA GAT ACA CTC TTT CCC TAC ACG | 5858 |
| ACG CTC TTC CGA TCT GCA ATT CGN NNN NNG GGC TGG CAA GCC ACG | |
| TTT GGT G | |
| CAA GCA GAA GAC GGC ATA CGA GAT ACA CTC TTT CCC TAC ACG | 5859 |
| ACG CTC TTC CGA TCT CAA GAG GTN NNN NNG GGC TGG CAA GCC | |
| ACG TTT GGT G | |
| CAA GCA GAA GAC GGC ATA CGA GAT ACA CTC TTT CCC TAC ACG | 5860 |
| ACG CTC TTC CGA TCT TCG ATT AAN NNN NNG GGC TGG CAA GCC ACG | |
| TTT GGT G | |
| CAA GCA GAA GAC GGC ATA CGA GAT ACA CTC TTT CCC TAC ACG | 5861 |
| ACG CTC TTC CGA TCT GAA TGG ACN NNN NNG GGC TGG CAA GCC | |
| ACG TTT GGT G | |
| CAA GCA GAA GAC GGC ATA CGA GAT ACA CTC TTT CCC TAC ACG | 5862 |
| ACG CTC TTC CGA TCT AGA ATC AGN NNN NNG GGC TGG CAA GCC | |
| ACG TTT GGT G | |
| CAA GCA GAA GAC GGC ATA CGA GAT ACA CTC TTT CCC TAC ACG | 5863 |
| ACG CTC TTC CGA TCT AAC TGC CAN NNN NNG GGC TGG CAA GCC | |
| ACG TTT GGT G | |
| CAA GCA GAA GAC GGC ATA CGA GAT ACA CTC TTT CCC TAC ACG | 5864 |
| ACG CTC TTC CGA TCT AAG TAA CGN NNN NNG GGC TGG CAA GCC | |
| ACG TTT GGT G | |
| CAA GCA GAA GAC GGC ATA CGA GAT ACA CTC TTT CCC TAC ACG | 5865 |
| ACG CTC TTC CGA TCT ACT CAA TGN NNN NNG GGC TGG CAA GCC ACG | |
| TTT GGT G | |
| CAA GCA GAA GAC GGC ATA CGA GAT ACA CTC TTT CCC TAC ACG | 5866 |
| ACG CTC TTC CGA TCT CCT AGT AGN NNN NNG GGC TGG CAA GCC ACG | |
| TTT GGT G | |
| CAA GCA GAA GAC GGC ATA CGA GAT ACA CTC TTT CCC TAC ACG | 5867 |
| ACG CTC TTC CGA TCT CTG ACG TTN NNN NNG GGC TGG CAA GCC ACG | |
| TTT GGT G | |
| CAA GCA GAA GAC GGC ATA CGA GAT ACA CTC TTT CCC TAC ACG | 5868 |
| ACG CTC TTC CGA TCT TGC AGA CAN NNN NNG GGC TGG CAA GCC | |
| ACG TTT GGT G | |
| CAA GCA GAA GAC GGC ATA CGA GAT ACA CTC TTT CCC TAC ACG | 5869 |
| ACG CTC TTC CGA TCT AGT TGA CCN NNN NNG GGC TGG CAA GCC ACG | |
| TTT GGT G | |
| CAA GCA GAA GAC GGC ATA CGA GAT ACA CTC TTT CCC TAC ACG | 5870 |
| ACG CTC TTC CGA TCT GTC TCC TAN NNN NNG GGC TGG CAA GCC ACG | |
| TTT GGT G | |
| CAA GCA GAA GAC GGC ATA CGA GAT ACA CTC TTT CCC TAC ACG | 5871 |
| ACG CTC TTC CGA TCT CTG CAA TCN NNN NNG GGC TGG CAA GCC ACG | |
| TTT GGT G | |
| CAA GCA GAA GAC GGC ATA CGA GAT ACA CTC TTT CCC TAC ACG | 5872 |
| ACG CTC TTC CGA TCT TGA GCG AAN NNN NNG GGC TGG CAA GCC | |
| ACG TTT GGT G | |
| CAA GCA GAA GAC GGC ATA CGA GAT ACA CTC TTT CCC TAC ACG | 5873 |
| ACG CTC TTC CGA TCT TTG GAC TGN NNN NNG GGC TGG CAA GCC ACG | |
| TTT GGT G | |
| CAA GCA GAA GAC GGC ATA CGA GAT ACA CTC TTT CCC TAC ACG | 5874 |
| ACG CTC TTC CGA TCT AGC AAT CCN NNN NNG GGC TGG CAA GCC | |
| ACG TTT GGT G | |
| CAA GCA GAA GAC GGC ATA CGA GAT ACA CTC TTT CCC TAC ACG | 5875 |
| ACG CTC TTC CGA TCT CGA ACT ACN NNN NNG GGC TGG CAA GCC | |
| ACG TTT GGT G | |
| CAA GCA GAA GAC GGC ATA CGA GAT ACA CTC TTT CCC TAC ACG | 5876 |
| ACG CTC TTC CGA TCT TTA ATG GCN NNN NNG GGC TGG CAA GCC ACG | |
| TTT GGT G | |
| CAA GCA GAA GAC GGC ATA CGA GAT ACA CTC TTT CCC TAC ACG | 5877 |
| ACG CTC TTC CGA TCT GCT TAG TAN NNN NNG GGC TGG CAA GCC ACG | |
| TTT GGT G | |

### Example 2

### Single Cell Labeling of Adaptive Immune Receptor Encoding Sequences

[0226] This example describes single cell labeling of immunoglobulin and T cell receptor heavy and light chain encoding sequences by RT-PCR. Freshly drawn blood from healthy human volunteers is used as a source of leukocytes. The amount of whole blood required to obtain 100,000-300,000 leukocytes is less than 1 mL; 1-3 mL of blood are used for isolation of blood cells. Peripheral blood mononuclear cells (PBMC) are isolated from blood by density gradient centrifugation on Histopaque®-1077 (Sigma, St. Louis, Mo.) according to the supplier's instructions. CD45⁺ hematopoietic cells are isolated by binding to anti-CD45 coated magnetic beads using Whole Blood CD45 Microbeads (Miltenyi Biotec, Auburn, Calif.) as instructed by the manufacturer and essentially as described in Koehl et al. (2003 Leukemia 17:232). Leukocyte cell suspensions are washed in phosphate-buffered saline solution (PBS) and adjusted to a concentration of 1×10⁶ cells/mL. Aliquots of 1-3 μL (1-3×10³ cells) are distributed into wells of 96-well PCR multiwell plates held on ice in pre-chilled plate racks. Immediately after all plate wells are filled, the plates are sealed and placed on dry ice to freeze and lyse the cells. Plates are held on dry ice during the reverse transcription preparation steps below.

[0227] Reverse transcription is performed using the SMARTer™ Ultra Low RNA kit for Illumina sequencing (Clontech, Mountain View, Calif.) essentially according to the supplier's instructions. Stock Reaction Buffer is prepared by mixing 380 μl of Dilution Buffer with 20 μl of RNase inhibitor (40 U/μl). 250 μl of Reaction Buffer is then mixed with 100 μl of a 12 μM solution of the 3′ Smarter™ CDS II oligonucleotide (5′-Bio-AAGCAGTGGTATCAACGCAGAGTACT₍₃₀₎N,N-3′ [SEQ ID NO: 5878], where Bio is a biotin moiety; AAGCAGTGGTATCAACGCAGAGTAC [SEQ ID NO: 5879] is a universal adapter sequence, T₍₃₀₎ (SEQ ID NO: 5880) is a 30-mer of thymine residues, and N is any nucleotide (A, C, G or T).

[0228] The first-step annealing reactions for reverse transcription are set up by adding 3.5 μl of the Reaction Buffer containing the 3′ Smarter™ CDS II oligonucleotide primer to each well of the 96-well plate containing the lysed cells, sealing the plate and incubating it for 3 minutes at 72° C., after which it is returned to a chilled rack on ice.

[0229] Reverse Transcription Master Mix (450 μl for 100 rxns) is prepared by combining 200 μl of 5× First Strand Buffer, 25 μl of 100 mM dithithreitol (DTT), 100 μl of dNTPs (10 mM), 25 μl of RNase inhibitor (40 U/μl), and 100 μl of reverse transcriptase. A 96-well working plate is prepared containing 1.0 μl of a barcoded 3′-Smart™ CDSII oligonucleotide per well. The 3′-Smart CDSII oligo sequence is: 5′-AAGCAGTGGTATCAACGCAGAGTACBBBBBBBBrGrGrG-P-3′ [SEQ ID NO: 5881] where AAGCAGTGGTATCAACGCAGAGTAC [SEQ ID NO: 5879] is a universal adapter sequence; BBBBBBBB is an 8-nucleotide barcode (see list below for examples of barcodes); rG is riboguanine; and P is a 3′ phosphate blocking moiety.

TABLE 8
Barcode list (96 JS barcodes):

| Name | Sequence |
|---|---|
| JS01 | CAAGGTCA |
| JS02 | GCATAACT |
| JS03 | CTCTGATT |
| JS04 | TACGTACG |
| JS05 | TACGCGTT |
| JS06 | CTCAGTGA |
| JS07 | TCTGATAT |
| JS08 | CATATGCT |
| JS09 | CGTAATTA |
| JS10 | ACGTACTC |
| JS11 | CTTCTAAG |
| JS12 | ACTATGAC |
| JS13 | GACGTTAA |
| JS14 | ACAAGATA |
| JS15 | GACTAAGA |
| JS16 | GTGTCTAC |
| JS17 | TTCACTAG |
| JS18 | AATCGGAT |
| JS19 | AGTACCGA |
| JS20 | TTGCCTCA |
| JS21 | TCGTTAGC |
| JS22 | TATAGTTC |
| JS23 | TGGCGTAT |
| JS24 | TGGACATG |
| JS25 | AGGTTGCT |
| JS26 | ATATGCTG |
| JS27 | GTACAGTG |
| JS28 | ATCCATGG |
| JS29 | TGATGCGA |
| JS30 | GTAGCAGT |
| JS31 | GGATCATC |
| JS32 | GTGAACGT |
| JS33 | ATTAAGCG |
| JS34 | TATTGGCG |
| JS35 | CGATTACA |
| JS36 | TGTCATCG |
| JS37 | TATCAAGT |
| JS38 | AGGCTTGA |
| JS39 | GATAACCA |
| JS40 | AATCCTGC |
| JS41 | GTTATATC |
| JS42 | ACACACGT |
| JS43 | ATACGACT |
| JS44 | ATCTTCGT |
| JS45 | ACATGTAT |
| JS46 | TCCACAGT |
| JS47 | CAGTCTGT |
| JS48 | TCCATGTG |
| JS49 | TCACTGCA |
| JS50 | ATGGTCAA |
| JS51 | CAAGTCAC |
| JS52 | TAGACGGA |
| JS53 | CAGCTCTT |
| JS54 | GAGCGATA |
| JS55 | CTCGAGAA |
| JS56 | ATGACACC |
| JS57 | CTTCACGA |
| JS58 | CTATAAGG |
| JS59 | CGTAGAGT |
| JS60 | ATAGATAC |
| JS61 | TCGTCGAT |
| JS62 | TAAGAATC |
| JS63 | AATGACAG |
| JS64 | AGCTAGTG |
| JS65 | TGAGACCT |
| JS66 | AGCGTAAT |
| JS67 | TAACCAAG |
| JS68 | GATGGCTT |
| JS69 | GCATCTGA |
| JS70 | TTCCGGTA |
| JS71 | GACACTCT |
| JS72 | TTAAGCAT |
| JS73 | TGCTACAC |
| JS74 | TCAGCTTG |
| JS75 | CATGTAGA |
| JS76 | TTCGGAAC |
| JS77 | GCAATTCG |
| JS78 | CAAGAGGT |
| JS79 | TCGATTAA |
| JS80 | GAATGGAC |
| JS81 | AGAATCAG |
| JS82 | AACTGCCA |
| JS83 | AAGTAACG |
| JS84 | ACTCAATG |
| JS85 | CCTAGTAG |
| JS86 | CTGACGTT |
| JS87 | TGCAGACA |
| JS88 | AGTTGACC |
| JS89 | GTCTCCTA |
| JS90 | CTGCAATC |
| JS91 | TGAGCGAA |
| JS92 | TTGGACTG |
| JS93 | AGCAATCC |
| JS94 | CGAACTAC |
| JS95 | TTAATGGC |
| JS96 | GCTTAGTA |

[0230] To each well of the 96-well working plate containing 1.0 μl of a barcoded 3′-Smart™ CDSII oligonucleotide is added 4.5 μl of the Master Mix, and following completion of the annealing reaction, 5.5 μl of the Master Mix containing barcoded 3′-Smart™ CDSII oligonucleotide is transferred from each well of the 96-well working plate to the correspondingly positioned (respective) wells of the reverse transcription annealing plate. The reverse transcription annealing plate is placed onto a thermocycler and a program is run with the steps 42° C. for 90 minutes followed by 70° C. for 10 minutes. This temperature profile performs first cDNA strand synthesis on all poly-A mRNA transcript molecules released from leukocytes in each well. According to non-limiting theory, after the first cDNA strand synthesis, each cDNA molecule in a well contains universal adaptor sequences at both the 5′ and 3′ ends, and is uniquely tagged with an 8-nt barcode at the 5′ end.

[0231] Optionally, the barcoded cDNA molecules from all 96 reactions can be pooled at this step, and re-aliquoted onto a PCR plate where PCR amplification of immunoglobulin or T cell receptor cDNA takes place. The combining and splitting step permit substantially all barcoded cDNA molecules to be substantially evenly represented in subsequent PCR amplification reactions with adaptive immune receptor encoding (e.g., IG or TCR) C-segment gene specific primers.

[0232] The products of reverse transcription/cDNA first strand synthesis are next isolated by Solid Phase Reversible Immobilization Purification (SPRI) by mixing the contents of each well from the reverse transcription reaction plate with 25 μl of a suspension of Ampure™ XP SPRI magnetic beads (Beckman-Coulter Inc., Brea, Calif.) and incubating for 8 minutes at room temperature, followed by bead separation using a MagnaBot™ magnetic separator (Promega, Madison, Wis.) at room temperature according to the suppliers' instructions.

[0233] SPRI bead-immobilized cDNA first strands are immediately added to 5′RACE (rapid amplification of cDNA ends) PCR amplification reactions using Advantage 2™ PCR reagents (Clontech) according to the manufacturer's instructions. For each reaction, 50 μl of PCR Master Mix is added containing dNTPs, UPM primer mix, IG/TCR primer mix as described elsewhere herein, and Advantage 2™ polymerase and PCR buffer. The thermocycling conditions are: 95° C. for 1 minute; 30 cycles of 95° C. for 30 seconds, 63° C. for 30 seconds, and 72° C. for 3 minutes; 72° C. for 7 minutes; and then reactions are held at 10° C. prior to preparation for Illumina sequencing. PCR primer sequences are:

| | |
|---|---|
| 5′RACE UPM | 5′-CTAATACGACTCACTATAGGGCAAGCAGTG |
| long | GTATCAACGCAGAGT-3′ (SEQ ID NO: 5611) |
| 5′RACE UPM | 5′-CTAATACGACTCACTATAGGGC-3′ |
| short | (SEQ ID NO: 5612) |
| IgM_RACE | 5′-GATGGAGTCGGGAAGGAAGTCCTGTGCGAG-3′ |
| | (SEQ ID NO: 5601) |
| IgG_RACE | 5′-GGGAAGACSGATGGGCCCTTGGTGG-3′ |
| | (SEQ ID NO: 5602) |
| IgA_RACE | 5′-CAGGCAKGCGAYGACCACGTTCCCATC-3′ |
| | (SEQ ID NO: 5603) |
| Igκ_RACE | 5′-CATCAGATGGCGGGAAGATGAAGACAGATGGTG |
| | C-3′ (SEQ ID NO: 5604) |
| Igλ_RACE | 5′-CCTCAGAGGAGGGTGGGAACAGAGTGAC-3′ |
| | (SEQ ID NO: 5605) |
| TCRB_RACE | 5′-GCTCAAACACAGCGACCTCGGGTGGGAACA |
| | C-3′ (SEQ ID NO: 5606) |
| TCRA_RACE_ | 5′-AGTCTCTCAGCTGGTACACGGCAGGGTC-3′ |
| JB2 | (SEQ ID NO: 5591) |
| TCRA_50 | 5′-ACA GAC TTG TCA CTG GAT TTA GAG |
| | TCT CTC AGC TGG TAC ACG GCA GGG |
| | TC-3′ (SEQ ID NO: 5592) |
| TCRB_50 | 5′-GAG ATC TCT GCT TCT GAT GGC TCA |
| | AAC ACA GCG ACC TCG GGT GGG AAC |
| | AC-3′ (SEQ ID NO: 5593) |
| S | G or C |
| K | G or T |
| Y | C or T |

[0234] Illumina Sequencing Library Preparation

[0235] PCR products are pooled by inverted centrifugation of the 96-well plates and the pooled products are purified to remove DNA fragments shorter than 200-300 bp using Beckman Coulter Ampure™ XP beads according to the supplier's instructions. DNA purity is assessed by capillary electrophoresis using a Caliper Bioanalyzer (Perkin Elmer, Norwalk, Conn.) to confirm that most of the dsDNA is within a size range of 600-700 bp. dsDNA products are quantified fluorometrically or by A260 UV absorbance.

[0236] Sequencing library construction is conducted using 1 μg of purified DNA as an input for the Illumina TruSeq® sample preparation protocol (Illumina Inc., San Diego, Calif.) according to the Illumina TruSeq® DNA Sample Preparation Guide (Part number 15026486 Rev. C, July 2012, Illumina, Inc., San Diego, Calif.). This protocol generates a sequencing library that can be sequenced using the paired-end flow cell on the Illumina MiSeq®, HiSeq®2000, and HiSeq®2500 sequencers.

[0237] Illumina sequencing is conducted according to a sequencing protocol on the Illumina MiSeq® sequencer that utilizes the MiSeq® reagents kit v2, for 500 cycles. This chemistry provides kitted reagents for up to 525 cycles of sequencing on the MiSeq® instrument and provides sufficient reagents for a 251-cycle paired-end run, plus two eight-cycle indexed reads. The Illumina sequencing protocol is described in MiSeq® ReagentKit v2 ReagentPrepGuide, Part number 15034097 Rev. B, October 2012 (Illumina Inc., San Diego, Calif.). A schematic representation of the structure of DNA targets to be sequenced is shown in FIG. 6 (in which Ig heavy chain is used as an example).

[0238] The various embodiments described above can be combined to provide further embodiments. All of the U.S. patents, U.S. patent application publications, U.S. patent applications, foreign patents, foreign patent applications and non-patent publications referred to in this specification and are incorporated herein by reference, in their entirety. Aspects of the embodiments can be modified, if necessary to employ concepts of the various patents, applications and publications to provide yet further embodiments.

[0239] These and other changes can be made to the embodiments in light of the above-detailed description. In general, in the following claims, the terms used should not be construed to limit the claims to the specific embodiments disclosed in the specification and the claims, but should be construed to include all possible embodiments along with the full scope of equivalents to which such claims are entitled. Accordingly, the claims are not limited by the disclosure.

1. An oligonucleotide amplification primer composition, comprising:
(A) a first oligonucleotide amplification primer set comprising a plurality of forward oligonucleotide sequences of a general formula (A):
U1-B1-V1 (A),
and a plurality of reverse oligonucleotide sequences of a general formula (B):
U2-B2-J1 (B),
wherein U1 comprises an oligonucleotide sequence comprising a first universal adaptor oligonucleotide sequence, and U2 comprises an oligonucleotide sequence comprising a second universal adaptor oligonucleotide sequence,
wherein B1 comprises an oligonucleotide sequence that comprises either nothing or a first oligonucleotide barcode sequence of at least 6 contiguous nucleotides, and B2 comprises an oligonucleotide sequence that comprises either nothing or a first oligonucleotide barcode sequence of at least 6 contiguous nucleotides, such that at least one of B1 or B2 is present,
wherein V1 comprises an oligonucleotide sequence comprising at least 15 and not more than 100 contiguous nucleotides of a V region encoding gene sequence of a first adaptive immune receptor, or the complement thereof,
wherein J1 comprises an oligonucleotide sequence comprising at least 15 and not more than 80 contiguous nucleotides of (i) a joining (J) region encoding gene sequence of said first adaptive immune receptor, or the complement thereof, or (ii) a constant (C) region encoding gene sequence of said first adaptive immune receptor, or the complement thereof,
wherein in each of the plurality of oligonucleotide sequences of general formula U1-B1-V1, V1 comprises a unique oligonucleotide sequence, and in each of the plurality of oligonucleotide sequences of general formula U2-B2-J1, J1 comprises a unique oligonucleotide sequence; and
(B) a second oligonucleotide amplification primer set comprising a plurality of forward oligonucleotide sequences of a general formula (C):
U3-B3-V2 (C),
and a plurality of reverse oligonucleotide sequences of a general formula (D):
U4-B4-J2 (D),
wherein U3 comprises an oligonucleotide sequence identical to either U1 or U2, and U4 comprises an oligonucleotide sequence identical to either U1 or U2, whichever sequence is not identical to U3,
wherein B3 comprises an oligonucleotide sequence comprising an oligonucleotide barcode sequence of at least 6 contiguous nucleotides that is identical to B1, and B4 comprises an oligonucleotide sequence comprising an oligonucleotide barcode sequence of at least 6 contiguous nucleotides that is identical to B2,
wherein V2 comprises an oligonucleotide sequence comprising at least 15 and not more than 100 contiguous nucleotides of a V region encoding gene sequence of a second adaptive immune receptor, or the complement thereof,
wherein J2 comprises an oligonucleotide sequence comprising at least 15 and not more than 80 contiguous nucleotides of (i) a joining (J) region encoding gene sequence of said second adaptive immune receptor, or the complement thereof, or (ii) a constant (C) region encoding gene sequence of said second adaptive immune receptor, or the complement thereof,
wherein in each of the plurality of oligonucleotide sequences of general formula U3-B3-V2, V2 comprises a unique oligonucleotide sequence, and in each of the plurality of oligonucleotide sequences of general formula U4-B4-J2, J2 comprises a unique oligonucleotide sequence.

2. The composition of claim 1, wherein U1 is the same as U3 and U2 is the same as U4.

3. (canceled)

4. The composition of claim 1, wherein B1, B2, B3, and B4 each comprise an oligonucleotide sequence that is 6 to 20 contiguous nucleotides in length.

5. (canceled)

6. An oligonucleotide primer composition, comprising a plurality of first oligonucleotide sequences having a general formula (I):
5′-U1-B1-X-3′ (I)
wherein:
U1 comprises an oligonucleotide sequence which comprises a first universal adaptor oligonucleotide sequence,
B1 comprises an oligonucleotide sequence that comprises a first oligonucleotide barcode sequence of n contiguous nucleotides, wherein n is at least 6 nucleotides, and
X comprises an oligonucleotide sequence comprising at least 15 and not more than 80 contiguous nucleotides of an adaptive immune receptor variable (V) region encoding gene sequence, or the complement thereof, wherein in each of the plurality of oligonucleotide sequences, X comprises a unique oligonucleotide sequence, and
a plurality of second oligonucleotide primer sequences having a general formula (II):
5′-U1-1-Y-3′ (II)
wherein:
U1 comprises an oligonucleotide sequence which comprises a first universal adaptor oligonucleotide sequence,
B1 comprises an oligonucleotide sequence that comprises a first oligonucleotide barcode sequence of n contiguous nucleotides, wherein n is at least 6 nucleotides, and
Y comprises an oligonucleotide sequence comprising at least 15 and not more than 80 contiguous nucleotides of either (i) an adaptive immune receptor joining (J) region encoding gene sequence, or the complement thereof, or (ii) an adaptive immune receptor constant (C) region encoding gene sequence, or the complement thereof,
wherein in each of the plurality of second oligonucleotide sequences, Y comprises a unique oligonucleotide sequence.

7. The composition of claim 5, wherein the plurality of first or second oligonucleotide sequences comprises up to 4″ unique B1 oligonucleotide sequences.

8. (canceled)

9. The composition of claim 5, wherein n is 7 to 20 contiguous nucleotides.

10. The composition of claim 5, wherein X comprises an oligonucleotide sequence comprising 20 to 50 contiguous nucleotides of said adaptive immune receptor V region encoding gene sequence, or said complement thereof.

11. (canceled)

12. The composition of claim 5, wherein Y comprises an oligonucleotide sequence comprising 16-50 contiguous nucleotides of said adaptive immune receptor J region encoding gene sequence, or said complement thereof or 16-50 contiguous nucleotides of said adaptive immune receptor C region encoding gene sequence, or said complement thereof.

13. (canceled)

14. The composition of claim 5, wherein Y comprises an oligonucleotide sequence comprising not more than 70 contiguous nucleotides of said adaptive immune receptor J region encoding gene sequence, or said complement thereof.

15. The composition of claim 5, wherein X is capable of hybridizing to a V region encoding gene sequence.

16. The composition of claim 5, wherein Y is capable of hybridizing to a J region encoding gene sequence or a C region encoding gene sequence.

17. (canceled)

18. The composition of claim 5, wherein B1 is a unique tag for identifying individual rearranged TCR or Ig encoding sequences.

19. (canceled)

20. The composition of claim 5, wherein B1 comprises a sequence selected from the group consisting of sequences listed in Table 8.

21. The composition of claim 5, wherein U1 comprises a sequence selected from the group consisting of SEQ ID NOs: 1710-1731.

22. The composition of claim 5, wherein X comprises a sequence selected from the group consisting of SEQ ID NOs: 1644-1695.

23. The composition of claim 5, wherein Y comprises a sequence selected from the group consisting of SEQ ID NOs: 1631-1643 or 1696-1708 or 5613-5625.

24. (canceled)

25. The composition of claim 5, wherein said plurality of first or second oligonucleotide sequences comprises SEQ ID NOs: 5626-5685.

26. The composition of claim 5, wherein said plurality of first or second oligonucleotide sequences comprises SEQ ID NOs: 1-1630.

27. The composition of claim 5, further comprising: a plurality of third oligonucleotide sequences comprising a general formula (III):
5′-P1-S1-B2-U1-3′ (III),
wherein P1 comprises a sequencing platform-specific oligonucleotide,
wherein S1 comprises a sequencing platform tag-containing oligonucleotide sequence;
wherein B2 comprises an oligonucleotide barcode sequence and wherein said oligonucleotide barcode sequence can be used to identify a sample source, and
wherein U1 comprises said first universal adaptor oligonucleotide sequence.

28. The composition of claim 27, wherein said plurality of third oligonucleotide sequences comprises SEQ ID NOs: 5686-5877.

29.-30. (canceled)

The application's sequence listing, which the Patent Office published only in electronic form, follows.

SEQUENCE LISTING (5881 sequences)

SEQ ID NO: 1 - DNA, 495 bp, Artificial Sequence
  source: /note="Description of Artificial Sequence: Synthetic polynucleotide"
gcctccctcgcgccatcagagagtgtcacgtgtgtctgtggacccacttttccctgtgacggatctgcaaaagaacctgaaaaatgtcttacctacaactgtgagtctggtgccttgtccaaagaaagcttcagtgtcgacagagtgtcacgtgtgttcactgctggtgcagagatacgcagctgagtcttcttgctgcagtgcgaccacatgaaggtataagcgagagctgtcagggcattcaggtgtgaagtgatttggcacagtcttgttttcaatgaattccttacagttgtagtaaaacatgaactccagggatttcttagctttctgtctgtaccaatacatagaatcatgtcccagatgctcacgtttcattgtccttttactccccattgctgtgaccaggtattttggtgtctgggtaattccagtatccatggagcctatgaaaataagaagagtgtcacgtgtgtctgagcgggctggcaaggc

SEQ ID NO: 2 - DNA, 495 bp, Artificial Sequence
  source: /note="Description of Artificial Sequence: Synthetic polynucleotide"
gcctccctcgcgccatcaggttccgaaacgtgtgtatttcccaggacagagtcctccctcatcgcacccctcctagagacccccagccttacctacaacggttaacctggtccccgaaccgaaggtgtagccatagtcgacgttccgaaacgtgtgttcactgctggtgcagagatacgcagctgagtcttcttgctgcagtgcgaccacatgaaggtataagcgagagctgtcagggcattcaggtgtgaagtgatttggcacagtcttgttttcaatgaattccttacagttgtagtaaaacatgaactccagggatttcttagctttctgtctgtaccaatacatagaatcatgtcccagatgctcacgtttcattgtccttttactccccattgctgtgaccaggtattttggtgtctgggtaattccagtatccatggagcctatgaaaataagagttccgaaacgtgtgtctgagcgggctggcaaggc

SEQ ID NO: 3 - DNA, 495 bp, Artificial Sequence
  source: /note="Description of Artificial Sequence: Synthetic polynucleotide"
gcctccctcgcgccatcagcgttacttacgtgtgtctggattccagcccctttttgcaagttcccagctgtccagccttgacttactcacctacaacagtgagccaacttccctctccaaaatatatggtgtttcgtcgaccgttacttacgtgtgttcactgctggtgcagagatacgcagctgagtcttcttgctgcagtgcgaccacatgaaggtataagcgagagctgtcagggcattcaggtgtgaagtgatttggcacagtcttgttttcaatgaattccttacagttgtagtaaaacatgaactccagggatttcttagctttctgtctgtaccaatacatagaatcatgtcccagatgctcacgtttcattgtccttttactccccattgctgtgaccaggtattttggtgtctgggtaattccagtatccatggagcctatgaaaataagacgttacttacgtgtgtctgagcgggctggcaaggc

SEQ ID NO: 4 - DNA, 495 bp, Artificial Sequence
  source: /note="Description of Artificial Sequence: Synthetic polynucleotide"
gcctccctcgcgccatcagtaggagacacgtgtgtctcctggaactccgaccttatgatacactatcccgaaagaagtcttttacatacccaagacagagagctgggttccactgccaaaaaacagtttttcattgtcgactaggagacacgtgtgttcactgctggtgcagagatacgcagctgagtcttcttgctgcagtgcgaccacatgaaggtataagcgagagctgtcagggcattcaggtgtgaagtgatttggcacagtcttgttttcaatgaattccttacagttgtagtaaaacatgaactccagggatttcttagctttctgtctgtaccaatacatagaatcatgtcccagatgctcacgtttcattgtccttttactccccattgctgtgaccaggtattttggtgtctgggtaattccagtatccatggagcctatgaaaataagataggagacacgtgtgtctgagcgggctggcaaggc

SEQ ID NO: 5 - DNA, 495 bp, Artificial Sequence
  source: /note="Description of Artificial Sequence: Synthetic polynucleotide"
gcctccctcgcgccatcaggacactctacgtgtgtagagaactctgccttcaagggacaatggccataccaccctgattctgcaacttacctaggatggagagtcgagtcccatcaccaaaatgctggggctgatgtcgacgacactctacgtgtgttcactgctggtgcagagatacgcagctgagtcttcttgctgcagtgcgaccacatgaaggtataagcgagagctgtcagggcattcaggtgtgaagtgatttggcacagtcttgttttcaatgaattccttacagttgtagtaaaacatgaactccagggatttcttagctttctgtctgtaccaatacatagaatcatgtcccagatgctcacgtttcattgtccttttactccccattgctgtgaccaggtattttggtgtctgggtaattccagtatccatggagcctatgaaaataagagacactctacgtgtgtctgagcgggctggcaaggc

SEQ ID NO: 6 - DNA, 495 bp, Artificial Sequence
  source: /note="Description of Artificial Sequence: Synthetic polynucleotide"
gcctccctcgcgccatcagttcggaacacgtgtgtatcattgcagtcaaacccaggcacccccgagtcaagagtggagcccccatacctgtcacagtgagcctggtcccgttcccaaagtggaggggtgaattatgtcgacttcggaacacgtgtgttcactgctggtgcagagatacgcagctgagtcttcttgctgcagtgcgaccacatgaaggtataagcgagagctgtcagggcattcaggtgtgaagtgatttggcacagtcttgttttcaatgaattccttacagttgtagtaaaacatgaactccagggatttcttagctttctgtctgtaccaatacatagaatcatgtcccagatgctcacgtttcattgtccttttactccccattgctgtgaccaggtattttggtgtctgggtaattccagtatccatggagcctatgaaaataagattcggaacacgtgtgtctgagcgggctggcaaggc

SEQ ID NO: 7 - DNA, 495 bp, Artificial Sequence
  source: /note="Description of Artificial Sequence: Synthetic polynucleotide"
gcctccctcgcgccatcagaagtaacgacgtgtgtgggtcgtgcaggctgggctgctcaccctctctcccacctggagcccccttcttacctagcacggtgagccgtgtccctggcccgaagaactgctcattgtgtcgacaagtaacgacgtgtgttcactgctggtgcagagatacgcagctgagtcttcttgctgcagtgcgaccacatgaaggtataagcgagagctgtcagggcattcaggtgtgaagtgatttggcacagtcttgttttcaatgaattccttacagttgtagtaaaacatgaactccagggatttcttagctttctgtctgtaccaatacatagaatcatgtcccagatgctcacgtttcattgtccttttactccccattgctgtgaccaggtattttggtgtctgggtaattccagtatccatggagcctatgaaaataagaaagtaacgacgtgtgtctgagcgggctggcaaggc

SEQ ID NO: 8 - DNA, 495 bp, Artificial Sequence
  source: /note="Description of Artificial Sequence: Synthetic polynucleotide"
gcctccctcgcgccatcaggtctcctaacgtgtgtcctctgcccatcccgccctctcggagctctccggagccccaaccgcctccttacccagtacggtcagcctagagccttctccaaaaaacagctccccggtgtcgacgtctcctaacgtgtgttcactgctggtgcagagatacgcagctgagtcttcttgctgcagtgcgaccacatgaaggtataagcgagagctgtcagggcattcaggtgtgaagtgatttggcacagtcttgttttcaatgaattccttacagttgtagtaaaacatgaactccagggatttcttagctttctgtctgtaccaatacatagaatcatgtcccagatgctcacgtttcattgtccttttactccccattgctgtgaccaggtattttggtgtctgggtaattccagtatccatggagcctatgaaaataagagtctcctaacgtgtgtctgagcgggctggcaaggc

SEQ ID NO: 9 - DNA, 495 bp, Artificial Sequence
  source: /note="Description of Artificial Sequence: Synthetic polynucleotide"
gcctccctcgcgccatcaggtagacacacgtgtgtgcgtcccggggcgccccctccccagttccggggcttcagcgggagcccccgcttaccgagcactgtcagccgggtgcctgggccaaaatactgcgtatctgtcgacgtagacacacgtgtgttcactgctggtgcagagatacgcagctgagtcttcttgctgcagtgcgaccacatgaaggtataagcgagagctgtcagggcattcaggtgtgaagtgatttggcacagtcttgttttcaatgaattccttacagttgtagtaaaacatgaactccagggatttcttagctttctgtctgtaccaatacatagaatcatgtcccagatgctcacgtttcattgtccttttactccccattgctgtgaccaggtattttggtgtctgggtaattccagtatccatggagcctatgaaaataagagtagacacacgtgtgtctgagcgggctggcaaggc

SEQ ID NO: 10 - DNA, 495 bp, Artificial Sequence
  source: /note="Description of Artificial Sequence: Synthetic polynucleotide"
gcctccctcgcgccatcagcactgtacacgtgtgtcgcacaaaaacccgagcgcagtctcgtccccggtcccccggcggccccagcttacccagcactgagagccgggtcccggcgccgaagtactgaatgttttgtcgaccactgtacacgtgtgttcactgctggtgcagagatacgcagctgagtcttcttgctgcagtgcgaccacatgaaggtataagcgagagctgtcagggcattcaggtgtgaagtgatttggcacagtcttgttttcaatgaattccttacagttgtagtaaaacatgaactccagggatttcttagctttctgtctgtaccaatacatagaatcatgtcccagatgctcacgtttcattgtccttttactccccattgctgtgaccaggtattttggtgtctgggtaattccagtatccatggagcctatgaaaataagacactgtacacgtgtgtctgagcgggctggcaaggc

SEQ ID NO: 11 - DNA, 495 bp, Artificial Sequence
  source: /note="Description of Artificial Sequence: Synthetic polynucleotide"
gcctccctcgcgccatcaggatgatccacgtgtgtccccgcaaaaaccagacccaagccgcccgcgcccgcgccccagcagcccgcgctcaccgagcaccaggagccgcgtgcctggcccgaagtactgggtctcgtcgacgatgatccacgtgtgttcactgctggtgcagagatacgcagctgagtcttcttgctgcagtgcgaccacatgaaggtataagcgagagctgtcagggcattcaggtgtgaagtgatttggcacagtcttgttttcaatgaattccttacagttgtagtaaaacatgaactccagggatttcttagctttctgtctgtaccaatacatagaatcatgtcccagatgctcacgtttcattgtccttttactccccattgctgtgaccaggtattttggtgtctgggtaattccagtatccatggagcctatgaaaataagagatgatccacgtgtgtctgagcgggctggcaaggc

SEQ ID NO: 12 - DNA, 495 bp, Artificial Sequence
  source: /note="Description of Artificial Sequence: Synthetic polynucleotide"
gcctccctcgcgccatcagcgccaataacgtgtgtccgccgccttccacctgaatcccgccgcccgggtggtcccgcgaaaactcacccagcacggtcagcctgctgccggccccgaaagtcaggacgttggcccgtcgaccgccaataacgtgtgttcactgctggtgcagagatacgcagctgagtcttcttgctgcagtgcgaccacatgaaggtataagcgagagctgtcagggcattcaggtgtgaagtgatttggcacagtcttgttttcaatgaattccttacagttgtagtaaaacatgaactccagggatttcttagctttctgtctgtaccaatacatagaatcatgtcccagatgctcacgtttcattgtccttttactccccattgctgtgaccaggtattttggtgtctgggtaattccagtatccatggagcctatgaaaataagacgccaataacgtgtgtctgagcgggctggcaaggc

SEQ ID NO: 13 - DNA, 495 bp, Artificial Sequence
  source: /note="Description of Artificial Sequence: Synthetic polynucleotide"
gcctccctcgcgccatcagtcaagcctacgtgtgtccaccctccgactccggggaccgaggggctggaaggtggggagacgcccgaatctcacctgtgaccgtgagcctggtgcccggcccgaagtactgctcgtgtcgactcaagcctacgtgtgttcactgctggtgcagagatacgcagctgagtcttcttgctgcagtgcgaccacatgaaggtataagcgagagctgtcagggcattcaggtgtgaagtgatttggcacagtcttgttttcaatgaattccttacagttgtagtaaaacatgaactccagggatttcttagctttctgtctgtaccaatacatagaatcatgtcccagatgctcacgtttcattgtccttttactccccattgctgtgaccaggtattttggtgtctgggtaattccagtatccatggagcctatgaaaataagatcaagcctacgtgtgtctgagcgggctggcaaggc

SEQ ID NO: 14 - DNA, 495 bp, Artificial Sequence
  source: /note="Description of Artificial Sequence: Synthetic polynucleotide"
gcctccctcgcgccatcagagagtgtctccgtctactgtggacccacttttccctgtgacggatctgcaaaagaacctgaaaaatgtcttacctacaactgtgagtctggtgccttgtccaaagaaagcttcagtgtcgacagagtgtctccgtctatcactgctggcacagaagtacatggctgagtcctccagctttgtggaccggatcttcagagtgaaatttgatccatcaggcctttcaactgagaattgatcatcgaatatttcagacttctctgagatttcattattataaaaggaaaccagaaactcgactttctgccccaagatttgtctgtaccaatagaagtataagtgattagagatggggacacagcgcaagatcacttcctgtcccatctgtgtgacctgatggctgggagtctgggtgacttcaggttctgtgagtcctgtgagaagagtgtctccgtctactgagcgggctggcaaggc

SEQ ID NO: 15 - DNA, 495 bp, Artificial Sequence
  source: /note="Description of Artificial Sequence: Synthetic polynucleotide"
gcctccctcgcgccatcaggttccgaatccgtctaatttcccaggacagagtcctccctcatcgcacccctcctagagacccccagccttacctacaacggttaacctggtccccgaaccgaaggtgtagccatagtcgacgttccgaatccgtctatcactgctggcacagaagtacatggctgagtcctccagctttgtggaccggatcttcagagtgaaatttgatccatcaggcctttcaactgagaattgatcatcgaatatttcagacttctctgagatttcattattataaaaggaaaccagaaactcgactttctgccccaagatttgtctgtaccaatagaagtataagtgattagagatggggacacagcgcaagatcacttcctgtcccatctgtgtgacctgatggctgggagtctgggtgacttcaggttctgtgagtcctgtgagagttccgaatccgtctactgagcgggctggcaaggc

SEQ ID NO: 16 - DNA, 495 bp, Artificial Sequence
  source: /note="Description of Artificial Sequence: Synthetic polynucleotide"
gcctccctcgcgccatcagcgttactttccgtctactggattccagcccctttttgcaagttcccagctgtccagccttgacttactcacctacaacagtgagccaacttccctctccaaaatatatggtgtttcgtcgaccgttactttccgtctatcactgctggcacagaagtacatggctgagtcctccagctttgtggaccggatcttcagagtgaaatttgatccatcaggcctttcaactgagaattgatcatcgaatatttcagacttctctgagatttcattattataaaaggaaaccagaaactcgactttctgccccaagatttgtctgtaccaatagaagtataagtgattagagatggggacacagcgcaagatcacttcctgtcccatctgtgtgacctgatggctgggagtctgggtgacttcaggttctgtgagtcctgtgagacgttactttccgtctactgagcgggctggcaaggc

SEQ ID NO: 17 - DNA, 495 bp, Artificial Sequence
  source: /note="Description of Artificial Sequence: Synthetic polynucleotide"
gcctccctcgcgccatcagtaggagactccgtctactcctggaactccgaccttatgatacactatcccgaaagaagtcttttacatacccaagacagagagctgggttccactgccaaaaaacagtttttcattgtcgactaggagactccgtctatcactgctggcacagaagtacatggctgagtcctccagctttgtggaccggatcttcagagtgaaatttgatccatcaggcctttcaactgagaattgatcatcgaatatttcagacttctctgagatttcattattataaaaggaaaccagaaactcgactttctgccccaagatttgtctgtaccaatagaagtataagtgattagagatggggacacagcgcaagatcacttcctgtcccatctgtgtgacctgatggctgggagtctgggtgacttcaggttctgtgagtcctgtgagataggagactccgtctactgagcgggctggcaaggc

SEQ ID NO: 18 - DNA, 495 bp, Artificial Sequence
  source: /note="Description of Artificial Sequence: Synthetic polynucleotide"
gcctccctcgcgccatcaggacactcttccgtctaagagaactctgccttcaagggacaatggccataccaccctgattctgcaacttacctaggatggagagtcgagtcccatcaccaaaatgctggggctgatgtcgacgacactcttccgtctatcactgctggcacagaagtacatggctgagtcctccagctttgtggaccggatcttcagagtgaaatttgatccatcaggcctttcaactgagaattgatcatcgaatatttcagacttctctgagatttcattattataaaaggaaaccagaaactcgactttctgccccaagatttgtctgtaccaatagaagtataagtgattagagatggggacacagcgcaagatcacttcctgtcccatctgtgtgacctgatggctgggagtctgggtgacttcaggttctgtgagtcctgtgagagacactcttccgtctactgagcgggctggcaaggc

SEQ ID NO: 19 - DNA, 495 bp, Artificial Sequence
  source: /note="Description of Artificial Sequence: Synthetic polynucleotide"
gcctccctcgcgccatcagttcggaactccgtctaatcattgcagtcaaacccaggcacccccgagtcaagagtggagcccccatacctgtcacagtgagcctggtcccgttcccaaagtggaggggtgaattatgtcgacttcggaactccgtctatcactgctggcacagaagtacatggctgagtcctccagctttgtggaccggatcttcagagtgaaatttgatccatcaggcctttcaactgagaattgatcatcgaatatttcagacttctctgagatttcattattataaaaggaaaccagaaactcgactttctgccccaagatttgtctgtaccaatagaagtataagtgattagagatggggacacagcgcaagatcacttcctgtcccatctgtgtgacctgatggctgggagtctgggtgacttcaggttctgtgagtcctgtgagattcggaactccgtctactgagcgggctggcaaggc

SEQ ID NO: 20 - DNA, 495 bp, Artificial Sequence
  source: /note="Description of Artificial Sequence: Synthetic polynucleotide"
gcctccctcgcgccatcagaagtaacgtccgtctagggtcgtgcaggctgggctgctcaccctctctcccacctggagcccccttcttacctagcacggtgagccgtgtccctggcccgaagaactgctcattgtgtcgacaagtaacgtccgtctatcactgctggcacagaagtacatggctgagtcctccagctttgtggaccggatcttcagagtgaaatttgatccatcaggcctttcaactgagaattgatcatcgaatatttcagacttctctgagatttcattattataaaaggaaaccagaaactcgactttctgccccaagatttgtctgtaccaatagaagtataagtgattagagatggggacacagcgcaagatcacttcctgtcccatctgtgtgacctgatggctgggagtctgggtgacttcaggttctgtgagtcctgtgagaaagtaacgtccgtctactgagcgggctggcaaggc

SEQ ID NO: 21 - DNA, 495 bp, Artificial Sequence
  source: /note="Description of Artificial Sequence: Synthetic polynucleotide"
gcctccctcgcgccatcaggtctcctatccgtctacctctgcccatcccgccctctcggagctctccggagccccaaccgcctccttacccagtacggtcagcctagagccttctccaaaaaacagctccccggtgtcgacgtctcctatccgtctatcactgctggcacagaagtacatggctgagtcctccagctttgtggaccggatcttcagagtgaaatttgatccatcaggcctttcaactgagaattgatcatcgaatatttcagacttctctgagatttcattattataaaaggaaaccagaaactcgactttctgccccaagatttgtctgtaccaatagaagtataagtgattagagatggggacacagcgcaagatcacttcctgtcccatctgtgtgacctgatggctgggagtctgggtgacttcaggttctgtgagtcctgtgagagtctcctatccgtctactgagcgggctggcaaggc

SEQ ID NO: 22 - DNA, 495 bp, Artificial Sequence
  source: /note="Description of Artificial Sequence: Synthetic polynucleotide"
gcctccctcgcgccatcaggtagacactccgtctagcgtcccggggcgccccctccccagttccggggcttcagcgggagcccccgcttaccgagcactgtcagccgggtgcctgggccaaaatactgcgtatctgtcgacgtagacactccgtctatcactgctggcacagaagtacatggctgagtcctccagctttgtggaccggatcttcagagtgaaatttgatccatcaggcctttcaactgagaattgatcatcgaatatttcagacttctctgagatttcattattataaaaggaaaccagaaactcgactttctgccccaagatttgtctgtaccaatagaagtataagtgattagagatggggacacagcgcaagatcacttcctgtcccatctgtgtgacctgatggctgggagtctgggtgacttcaggttctgtgagtcctgtgagagtagacactccgtctactgagcgggctggcaaggc

SEQ ID NO: 23 - DNA, 495 bp, Artificial Sequence
  source: /note="Description of Artificial Sequence: Synthetic polynucleotide"
gcctccctcgcgccatcagcactgtactccgtctacgcacaaaaacccgagcgcagtctcgtccccggtcccccggcggccccagcttacccagcactgagagccgggtcccggcgccgaagtactgaatgttttgtcgaccactgtactccgtctatcactgctggcacagaagtacatggctgagtcctccagctttgtggaccggatcttcagagtgaaatttgatccatcaggcctttcaactgagaattgatcatcgaatatttcagacttctctgagatttcattattataaaaggaaaccagaaactcgactttctgccccaagatttgtctgtaccaatagaagtataagtgattagagatggggacacagcgcaagatcacttcctgtcccatctgtgtgacctgatggctgggagtctgggtgacttcaggttctgtgagtcctgtgagacactgtactccgtctactgagcgggctggcaaggc

SEQ ID NO: 24 - DNA, 495 bp, Artificial Sequence
  source: /note="Description of Artificial Sequence: Synthetic polynucleotide"
gcctccctcgcgccatcaggatgatcctccgtctaccccgcaaaaaccagacccaagccgcccgcgcccgcgccccagcagcccgcgctcaccgagcaccaggagccgcgtgcctggcccgaagtactgggtctcgtcgacgatgatcctccgtctatcactgctggcacagaagtacatggctgagtcctccagctttgtggaccggatcttcagagtgaaatttgatccatcaggcctttcaactgagaattgatcatcgaatatttcagacttctctgagatttcattattataaaaggaaaccagaaactcgactttctgccccaagatttgtctgtaccaatagaagtataagtgattagagatggggacacagcgcaagatcacttcctgtcccatctgtgtgacctgatggctgggagtctgggtgacttcaggttctgtgagtcctgtgagagatgatcctccgtctactgagcgggctggcaaggc

SEQ ID NO: 25 - DNA, 495 bp, Artificial Sequence
  source: /note="Description of Artificial Sequence: Synthetic polynucleotide"
gcctccctcgcgccatcagcgccaatatccgtctaccgccgccttccacctgaatcccgccgcccgggtggtcccgcgaaaactcacccagcacggtcagcctgctgccggccccgaaagtcaggacgttggcccgtcgaccgccaatatccgtctatcactgctggcacagaagtacatggctgagtcctccagctttgtggaccggatcttcagagtgaaatttgatccatcaggcctttcaactgagaattgatcatcgaatatttcagacttctctgagatttcattattataaaaggaaaccagaaactcgactttctgccccaagatttgtctgtaccaatagaagtataagtgattagagatggggacacagcgcaagatcacttcctgtcccatctgtgtgacctgatggctgggagtctgggtgacttcaggttctgtgagtcctgtgagacgccaatatccgtctactgagcgggctggcaaggc

SEQ ID NO: 26 - DNA, 495 bp, Artificial Sequence
  source: /note="Description of Artificial Sequence: Synthetic polynucleotide"
gcctccctcgcgccatcagtcaagccttccgtctaccaccctccgactccggggaccgaggggctggaaggtggggagacgcccgaatctcacctgtgaccgtgagcctggtgcccggcccgaagtactgctcgtgtcgactcaagccttccgtctatcactgctggcacagaagtacatggctgagtcctccagctttgtggaccggatcttcagagtgaaatttgatccatcaggcctttcaactgagaattgatcatcgaatatttcagacttctctgagatttcattattataaaaggaaaccagaaactcgactttctgccccaagatttgtctgtaccaatagaagtataagtgattagagatggggacacagcgcaagatcacttcctgtcccatctgtgtgacctgatggctgggagtctgggtgacttcaggttctgtgagtcctgtgagatcaagccttccgtctactgagcgggctggcaaggc

SEQ ID NO: 27 - DNA, 495 bp, Artificial Sequence
  source: /note="Description of Artificial Sequence: Synthetic polynucleotide"
gcctccctcgcgccatcagagagtgtcaagagctgctgtggacccacttttccctgtgacggatctgcaaaagaacctgaaaaatgtcttacctacaactgtgagtctggtgccttgtccaaagaaagcttcagtgtcgacagagtgtcaagagctgtcactgctggcacagaaatacacagcagagtcaccaagctccagggaattgatgtgaagatttaagtgagctttgtctggagatttaggtgagaagcgatttggaactgtttcatttataatgagctccttattattgtagctaaacattatcttcagaaatttcttagagtcctgtttataccaatacatagtatcatggcccagattttgttcacatttaatggacttgtcgtttcccatctgtgtgaccaggtattttggagtctgggaaacagctgtgtccaagggacctgcaaaggaaagagtgtcaagagctgctgagcgggctggcaaggc

SEQ ID NO: 28 - DNA, 495 bp, Artificial Sequence
  source: /note="Description of Artificial Sequence: Synthetic polynucleotide"
gcctccctcgcgccatcaggttccgaaaagagctgatttcccaggacagagtcctccctcatcgcacccctcctagagacccccagccttacctacaacggttaacctggtccccgaaccgaaggtgtagccatagtcgacgttccgaaaagagctgtcactgctggcacagaaatacacagcagagtcaccaagctccagggaattgatgtgaagatttaagtgagctttgtctggagatttaggtgagaagcgatttggaactgtttcatttataatgagctccttattattgtagctaaacattatcttcagaaatttcttagagtcctgtttataccaatacatagtatcatggcccagattttgttcacatttaatggacttgtcgtttcccatctgtgtgaccaggtattttggagtctgggaaacagctgtgtccaagggacctgcaaaggaagttccgaaaagagctgctgagcgggctggcaaggc

SEQ ID NO: 29 - DNA, 495 bp, Artificial Sequence
  source: /note="Description of Artificial Sequence: Synthetic polynucleotide"
gcctccctcgcgccatcagcgttacttaagagctgctggattccagcccctttttgcaagttcccagctgtccagccttgacttactcacctacaacagtgagccaacttccctctccaaaatatatggtgtttcgtcgaccgttacttaagagctgtcactgctggcacagaaatacacagcagagtcaccaagctccagggaattgatgtgaagatttaagtgagctttgtctggagatttaggtgagaagcgatttggaactgtttcatttataatgagctccttattattgtagctaaacattatcttcagaaatttcttagagtcctgtttataccaatacatagtatcatggcccagattttgttcacatttaatggacttgtcgtttcccatctgtgtgaccaggtattttggagtctgggaaacagctgtgtccaagggacctgcaaaggaacgttacttaagagctgctgagcgggctggcaaggc

SEQ ID NO: 30 - DNA, 495 bp, Artificial Sequence
  source: /note="Description of Artificial Sequence: Synthetic polynucleotide"
gcctccctcgcgccatcagtaggagacaagagctgctcctggaactccgaccttatgatacactatcccgaaagaagtcttttacatacccaagacagagagctgggttccactgccaaaaaacagtttttcattgtcgactaggagacaagagctgtcactgctggcacagaaatacacagcagagtcaccaagctccagggaattgatgtgaagatttaagtgagctttgtctggagatttaggtgagaagcgatttggaactgtttcatttataatgagctccttattattgtagctaaacattatcttcagaaatttcttagagtcctgtttataccaatacatagtatcatggcccagattttgttcacatttaatggacttgtcgtttcccatctgtgtgaccaggtattttggagtctgggaaacagctgtgtccaagggacctgcaaaggaataggagacaagagctgctgagcgggctggcaaggc

SEQ ID NO: 31 - DNA, 495 bp, Artificial Sequence
  source: /note="Description of Artificial Sequence: Synthetic polynucleotide"
gcctccctcgcgccatcaggacactctaagagctgagagaactctgccttcaagggacaatggccataccaccctgattctgcaacttacctaggatggagagtcgagtcccatcaccaaaatgctggggctgatgtcgacgacactctaagagctgtcactgctggcacagaaatacacagcagagtcaccaagctccagggaattgatgtgaagatttaagtgagctttgtctggagatttaggtgagaagcgatttggaactgtttcatttataatgagctccttattattgtagctaaacattatcttcagaaatttcttagagtcctgtttataccaatacatagtatcatggcccagattttgttcacatttaatggacttgtcgtttcccatctgtgtgaccaggtattttggagtctgggaaacagctgtgtccaagggacctgcaaaggaagacactctaagagctgctgagcgggctggcaaggc

SEQ ID NO: 32 - DNA, 495 bp, Artificial Sequence
  source: /note="Description of Artificial Sequence: Synthetic polynucleotide"
gcctccctcgcgccatcagttcggaacaagagctgatcattgcagtcaaacccaggcacccccgagtcaagagtggagcccccatacctgtcacagtgagcctggtcccgttcccaaagtggaggggtgaattatgtcgacttcggaacaagagctgtcactgctggcacagaaatacacagcagagtcaccaagctccagggaattgatgtgaagatttaagtgagctttgtctggagatttaggtgagaagcgatttggaactgtttcatttataatgagctccttattattgtagctaaacattatcttcagaaatttcttagagtcctgtttataccaatacatagtatcatggcccagattttgttcacatttaatggacttgtcgtttcccatctgtgtgaccaggtattttggagtctgggaaacagctgtgtccaagggacctgcaaaggaattcggaacaagagctgctgagcgggctggcaaggc

SEQ ID NO: 33 - DNA, 495 bp, Artificial Sequence
  source: /note="Description of Artificial Sequence: Synthetic polynucleotide"
gcctccctcgcgccatcagaagtaacgaagagctggggtcgtgcaggctgggctgctcaccctctctcccacctggagcccccttcttacctagcacggtgagccgtgtccctggcccgaagaactgctcattgtgtcgacaagtaacgaagagctgtcactgctggcacagaaatacacagcagagtcaccaagctccagggaattgatgtgaagatttaagtgagctttgtctggagatttaggtgagaagcgatttggaactgtttcatttataatgagctccttattattgtagctaaacattatcttcagaaatttcttagagtcctgtttataccaatacatagtatcatggcccagattttgttcacatttaatggacttgtcgtttcccatctgtgtgaccaggtattttggagtctgggaaacagctgtgtccaagggacctgcaaaggaaaagtaacgaagagctgctgagcgggctggcaaggc

SEQ ID NO: 34 - DNA, 495 bp, Artificial Sequence
  source: /note="Description of Artificial Sequence: Synthetic polynucleotide"
gcctccctcgcgccatcaggtctcctaaagagctgcctctgcccatcccgccctctcggagctctccggagccccaaccgcctccttacccagtacggtcagcctagagccttctccaaaaaacagctccccggtgtcgacgtctcctaaagagctgtcactgctggcacagaaatacacagcagagtcaccaagctccagggaattgatgtgaagatttaagtgagctttgtctggagatttaggtgagaagcgatttggaactgtttcatttataatgagctccttattattgtagctaaacattatcttcagaaatttcttagagtcctgtttataccaatacatagtatcatggcccagattttgttcacatttaatggacttgtcgtttcccatctgtgtgaccaggtattttggagtctgggaaacagctgtgtccaagggacctgcaaaggaagtctcctaaagagctgctgagcgggctggcaaggc

SEQ ID NO: 35 - DNA, 495 bp, Artificial Sequence
  source: /note="Description of Artificial Sequence: Synthetic polynucleotide"
gcctccctcgcgccatcaggtagacacaagagctggcgtcccggggcgccccctccccagttccggggcttcagcgggagcccccgcttaccgagcactgtcagccgggtgcctgggccaaaatactgcgtatctgtcgacgtagacacaagagctgtcactgctggcacagaaatacacagcagagtcaccaagctccagggaattgatgtgaagatttaagtgagctttgtctggagatttaggtgagaagcgatttggaactgtttcatttataatgagctccttattattgtagctaaacattatcttcagaaatttcttagagtcctgtttataccaatacatagtatcatggcccagattttgttcacatttaatggacttgtcgtttcccatctgtgtgaccaggtattttggagtctgggaaacagctgtgtccaagggacctgcaaaggaagtagacacaagagctgctgagcgggctggcaaggc

SEQ ID NO: 36 - DNA, 495 bp, Artificial Sequence
  source: /note="Description of Artificial Sequence: Synthetic polynucleotide"
gcctccctcgcgccatcagcactgtacaagagctgcgcacaaaaacccgagcgcagtctcgtccccggtcccccggcggccccagcttacccagcactgagagccgggtcccggcgccgaagtactgaatgttttgtcgaccactgtacaagagctgtcactgctggcacagaaatacacagcagagtcaccaagctccagggaattgatgtgaagatttaagtgagctttgtctggagatttaggtgagaagcgatttggaactgtttcatttataatgagctccttattattgtagctaaacattatcttcagaaatttcttagagtcctgtttataccaatacatagtatcatggcccagattttgttcacatttaatggacttgtcgtttcccatctgtgtgaccaggtattttggagtctgggaaacagctgtgtccaagggacctgcaaaggaacactgtacaagagctgctgagcgggctggcaaggc

SEQ ID NO: 37 - DNA, 495 bp, Artificial Sequence
  source: /note="Description of Artificial Sequence: Synthetic polynucleotide"
gcctccctcgcgccatcaggatgatccaagagctgccccgcaaaaaccagacccaagccgcccgcgcccgcgccccagcagcccgcgctcaccgagcaccaggagccgcgtgcctggcccgaagtactgggtctcgtcgacgatgatccaagagctgtcactgctggcacagaaatacacagcagagtcaccaagctccagggaattgatgtgaagatttaagtgagctttgtctggagatttaggtgagaagcgatttggaactgtttcatttataatgagctccttattattgtagctaaacattatcttcagaaatttcttagagtcctgtttataccaatacatagtatcatggcccagattttgttcacatttaatggacttgtcgtttcccatctgtgtgaccaggtattttggagtctgggaaacagctgtgtccaagggacctgcaaaggaagatgatccaagagctgctgagcgggctggcaaggc

SEQ ID NO: 38 - DNA, 495 bp, Artificial Sequence
  source: /note="Description of Artificial Sequence: Synthetic polynucleotide"
gcctccctcgcgccatcagcgccaataaagagctgccgccgccttccacctgaatcccgccgcccgggtggtcccgcgaaaactcacccagcacggtcagcctgctgccggccccgaaagtcaggacgttggcccgtcgaccgccaataaagagctgtcactgctggcacagaaatacacagcagagtcaccaagctccagggaattgatgtgaagatttaagtgagctttgtctggagatttaggtgagaagcgatttggaactgtttcatttataatgagctccttattattgtagctaaacattatcttcagaaatttcttagagtcctgtttataccaatacatagtatcatggcccagattttgttcacatttaatggacttgtcgtttcccatctgtgtgaccaggtattttggagtctgggaaacagctgtgtccaagggacctgcaaaggaacgccaataaagagctgctgagcgggctggcaaggc

SEQ ID NO: 39 - DNA, 495 bp, Artificial Sequence
  source: /note="Description of Artificial Sequence: Synthetic polynucleotide"
gcctccctcgcgccatcagtcaagcctaagagctgccaccctccgactccggggaccgaggggctggaaggtggggagacgcccgaatctcacctgtgaccgtgagcctggtgcccggcccgaagtactgctcgtgtcgactcaagcctaagagctgtcactgctggcacagaaatacacagcagagtcaccaagctccagggaattgatgtgaagatttaagtgagctttgtctggagatttaggtgagaagcgatttggaactgtttcatttataatgagctccttattattgtagctaaacattatcttcagaaatttcttagagtcctgtttataccaatacatagtatcatggcccagattttgttcacatttaatggacttgtcgtttcccatctgtgtgaccaggtattttggagtctgggaaacagctgtgtccaagggacctgcaaaggaatcaagcctaagagctgctgagcgggctggcaaggc

SEQ ID NO: 40 - DNA, 495 bp, Artificial Sequence
  source: /note="Description of Artificial Sequence: Synthetic polynucleotide"
gcctccctcgcgccatcagagagtgtctatcgctcctgtggacccacttttccctgtgacggatctgcaaaagaacctgaaaaatgtcttacctacaactgtgagtctggtgccttgtccaaagaaagcttcagtgtcgacagagtgtctatcgctctcactgctggcacagaaatacacagcagagtcaccaagctccagggaattgatgtgaagatttaaatgagctttgtctggagagtcaggtgagaagcgatttggaactgtttcatttaaaattggctccttgttactgtagataaacattgtcttcagaaatttcttagagtcctgtttataccaatacatagcattatggcccagattttgttctcatttaagagactccttttttcccatctgtgtgaccaggtattttggagtctgggaaacggctgtgtccagtggatctgtaaaggaaagagtgtctatcgctcctgagcgggctggcaaggc

SEQ ID NO: 41 - DNA, 495 bp, Artificial Sequence
  source: /note="Description of Artificial Sequence: Synthetic polynucleotide"
gcctccctcgcgccatcaggttccgaatatcgctcatttcccaggacagagtcctccctcatcgcacccctcctagagacccccagccttacctacaacggttaacctggtccccgaaccgaaggtgtagccatagtcgacgttccgaatatcgctctcactgctggcacagaaatacacagcagagtcaccaagctccagggaattgatgtgaagatttaaatgagctttgtctggagagtcaggtgagaagcgatttggaactgtttcatttaaaattggctccttgttactgtagataaacattgtcttcagaaatttcttagagtcctgtttataccaatacatagcattatggcccagattttgttctcatttaagagactccttttttcccatctgtgtgaccaggtattttggagtctgggaaacggctgtgtccagtggatctgtaaaggaagttccgaatatcgctcctgagcgggctggcaaggc

SEQ ID NO: 42 - DNA, 495 bp, Artificial Sequence
  source: /note="Description of Artificial Sequence: Synthetic polynucleotide"
gcctccctcgcgccatcagcgttactttatcgctcctggattccagcccctttttgcaagttcccagctgtccagccttgacttactcacctacaacagtgagccaacttccctctccaaaatatatggtgtttcgtcgaccgttactttatcgctctcactgctggcacagaaatacacagcagagtcaccaagctccagggaattgatgtgaagatttaaatgagctttgtctggagagtcaggtgagaagcgatttggaactgtttcatttaaaattggctccttgttactgtagataaacattgtcttcagaaatttcttagagtcctgtttataccaatacatagcattatggcccagattttgttctcatttaagagactccttttttcccatctgtgtgaccaggtattttggagtctgggaaacggctgtgtccagtggatctgtaaaggaacgttactttatcgctcctgagcgggctggcaaggc

SEQ ID NO: 43 - DNA, 495 bp, Artificial Sequence
  source: /note="Description of Artificial Sequence: Synthetic polynucleotide"
gcctccctcgcgccatcagtaggagactatcgctcctcctggaactccgaccttatgatacactatcccgaaagaagtcttttacatacccaagacagagagctgggttccactgccaaaaaacagtttttcattgtcgactaggagactatcgctctcactgctggcacagaaatacacagcagagtcaccaagctccagggaattgatgtgaagatttaaatgagctttgtctggagagtcaggtgagaagcgatttggaactgtttcatttaaaattggctccttgttactgtagataaacattgtcttcagaaatttcttagagtcctgtttataccaatacatagcattatggcccagattttgttctcatttaagagactccttttttcccatctgtgtgaccaggtattttggagtctgggaaacggctgtgtccagtggatctgtaaaggaataggagactatcgctcctgagcgggctggcaaggc

SEQ ID NO: 44 - DNA, 495 bp, Artificial Sequence
  source: /note="Description of Artificial Sequence: Synthetic polynucleotide"
gcctccctcgcgccatcaggacactcttatcgctcagagaactctgccttcaagggacaatggccataccaccctgattctgcaacttacctaggatggagagtcgagtcccatcaccaaaatgctggggctgatgtcgacgacactcttatcgctctcactgctggcacagaaatacacagcagagtcaccaagctccagggaattgatgtgaagatttaaatgagctttgtctggagagtcaggtgagaagcgatttggaactgtttcatttaaaattggctccttgttactgtagataaacattgtcttcagaaatttcttagagtcctgtttataccaatacatagcattatggcccagattttgttctcatttaagagactccttttttcccatctgtgtgaccaggtattttggagtctgggaaacggctgtgtccagtggatctgtaaaggaagacactcttatcgctcctgagcgggctggcaaggc

SEQ ID NO: 45 - DNA, 495 bp, Artificial Sequence
  source: /note="Description of Artificial Sequence: Synthetic polynucleotide"
gcctccctcgcgccatcagttcggaactatcgctcatcattgcagtcaaacccaggcacccccgagtcaagagtggagcccccatacctgtcacagtgagcctggtcccgttcccaaagtggaggggtgaattatgtcgacttcggaactatcgctctcactgctggcacagaaatacacagcagagtcaccaagctccagggaattgatgtgaagatttaaatgagctttgtctggagagtcaggtgagaagcgatttggaactgtttcatttaaaattggctccttgttactgtagataaacattgtcttcagaaatttcttagagtcctgtttataccaatacatagcattatggcccagattttgttctcatttaagagactccttttttcccatctgtgtgaccaggtattttggagtctgggaaacggctgtgtccagtggatctgtaaaggaattcggaactatcgctcctgagcgggctggcaaggc

SEQ ID NO: 46 - DNA, 495 bp, Artificial Sequence
  source: /note="Description of Artificial Sequence: Synthetic polynucleotide"
gcctccctcgcgccatcagaagtaacgtatcgctcgggtcgtgcaggctgggctgctcaccctctctcccacctggagcccccttcttacctagcacggtgagccgtgtccctggcccgaagaactgctcattgtgtcgacaagtaacgtatcgctctcactgctggcacagaaatacacagcagagtcaccaagctccagggaattgatgtgaagatttaaatgagctttgtctggagagtcaggtgagaagcgatttggaactgtttcatttaaaattggctccttgttactgtagataaacattgtcttcagaaatttcttagagtcctgtttataccaatacatagcattatggcccagattttgttctcatttaagagactccttttttcccatctgtgtgaccaggtattttggagtctgggaaacggctgtgtccagtggatctgtaaaggaaaagtaacgtatcgctcctgagcgggctggcaaggc

SEQ ID NO: 47 - DNA, 495 bp, Artificial Sequence
  source: /note="Description of Artificial Sequence: Synthetic polynucleotide"
gcctccctcgcgccatcaggtctcctatatcgctccctctgcccatcccgccctctcggagctctccggagccccaaccgcctccttacccagtacggtcagcctagagccttctccaaaaaacagctccccggtgtcgacgtctcctatatcgctctcactgctggcacagaaatacacagcagagtcaccaagctccagggaattgatgtgaagatttaaatgagctttgtctggagagtcaggtgagaagcgatttggaactgtttcatttaaaattggctccttgttactgtagataaacattgtcttcagaaatttcttagagtcctgtttataccaatacatagcattatggcccagattttgttctcatttaagagactccttttttcccatctgtgtgaccaggtattttggagtctgggaaacggctgtgtccagtggatctgtaaaggaagtctcctatatcgctcctgagcgggctggcaaggc

SEQ ID NO: 48 - DNA, 495 bp, Artificial Sequence
  source: /note="Description of Artificial Sequence: Synthetic polynucleotide"
gcctccctcgcgccatcaggtagacactatcgctcgcgtcccggggcgccccctccccagttccggggcttcagcgggagcccccgcttaccgagcactgtcagccgggtgcctgggccaaaatactgcgtatctgtcgacgtagacactatcgctctcactgctggcacagaaatacacagcagagtcaccaagctccagggaattgatgtgaagatttaaatgagctttgtctggagagtcaggtgagaagcgatttggaactgtttcatttaaaattggctccttgttactgtagataaacattgtcttcagaaatttcttagagtcctgtttataccaatacatagcattatggcccagattttgttctcatttaagagactccttttttcccatctgtgtgaccaggtattttggagtctgggaaacggctgtgtccagtggatctgtaaaggaagtagacactatcgctcctgagcgggctggcaaggc

SEQ ID NO: 49 - DNA, 495 bp, Artificial Sequence
  source: /note="Description of Artificial Sequence: Synthetic polynucleotide"
gcctccctcgcgccatcagcactgtactatcgctccgcacaaaaacccgagcgcagtctcgtccccggtcccccggcggccccagcttacccagcactgagagccgggtcccggcgccgaagtactgaatgttttgtcgaccactgtactatcgctctcactgctggcacagaaatacacagcagagtcaccaagctccagggaattgatgtgaagatttaaatgagctttgtctggagagtcaggtgagaagcgatttggaactgtttcatttaaaattggctccttgttactgtagataaacattgtcttcagaaatttcttagagtcctgtttataccaatacatagcattatggcccagattttgttctcatttaagagactccttttttcccatctgtgtgaccaggtattttggagtctgggaaacggctgtgtccagtggatctgtaaaggaacactgtactatcgctcctgagcgggctggcaaggc

SEQ ID NO: 50 - DNA, 495 bp, Artificial Sequence
  source: /note="Description of Artificial Sequence: Synthetic polynucleotide"
gcctccctcgcgccatcaggatgatcctatcgctcccccgcaaaaaccagacccaagccgcccgcgcccgcgccccagcagcccgcgctcaccgagcaccaggagccgcgtgcctggcccgaagtactgggtctcgtcgacgatgatcctatcgctctcactgctggcacagaaatacacagcagagtcaccaagctccagggaattgatgtgaagatttaaatgagctttgtctggagagtcaggtgagaagcgatttggaactgtttcatttaaaattggctccttgttactgtagataaacattgtcttcagaaatttcttagagtcctgtttataccaatacatagcattatggcccagattttgttctcatttaagagactccttttttcccatctgtgtgaccaggtattttggagtctgggaaacggctgtgtccagtggatctgtaaaggaagatgatcctatcgctcctgagcgggctggcaaggc

SEQ ID NO: 51 - DNA, 495 bp, Artificial Sequence
  source: /note="Description of Artificial Sequence: Synthetic polynucleotide"
gcctccctcgcgccatcagcgccaatatatcgctcccgccgccttccacctgaatcccgccgcccgggtggtcccgcgaaaactcacccagcacggtcagcctgctgccggccccgaaagtcaggacgttggcccgtcgaccgccaatatatcgctctcactgctggcacagaaatacacagcagagtcaccaagctccagggaattgatgtgaagatttaaatgagctttgtctggagagtcaggtgagaagcgatttggaactgtttcatttaaaattggctccttgttactgtagataaacattgtcttcagaaatttcttagagtcctgtttataccaatacatagcattatggcccagattttgttctcatttaagagactccttttttcccatctgtgtgaccaggtattttggagtctgggaaacggctgtgtccagtggatctgtaaaggaacgccaatatatcgctcctgagcgggctggcaaggc

SEQ ID NO: 52 - DNA, 495 bp, Artificial Sequence
  source: /note="Description of Artificial Sequence: Synthetic polynucleotide"
gcctccctcgcgccatcagtcaagccttatcgctcccaccctccgactccggggaccgaggggctggaaggtggggagacgcccgaatctcacctgtgaccgtgagcctggtgcccggcccgaagtactgctcgtgtcgactcaagccttatcgctctcactgctggcacagaaatacacagcagagtcaccaagctccagggaattgatgtgaagatttaaatgagctttgtctggagagtcaggtgagaagcgatttggaactgtttcatttaaaattggctccttgttactgtagataaacattgtcttcagaaatttcttagagtcctgtttataccaatacatagcattatggcccagattttgttctcatttaagagactccttttttcccatctgtgtgaccaggtattttggagtctgggaaacggctgtgtccagtggatctgtaaaggaatcaagccttatcgctcctgagcgggctggcaaggc

SEQ ID NO: 53 - DNA, 495 bp, Artificial Sequence
  source: /note="Description of Artificial Sequence: Synthetic polynucleotide"
gcctccctcgcgccatcagagagtgtctcagatgcctgtggacccacttttccctgtgacggatctgcaaaagaacctgaaaaatgtcttacctacaactgtgagtctggtgccttgtccaaagaaagcttcagtgtcgacagagtgtctcagatgctcactgctggcgcagagatacagggctgagtcttctggctgcagggcgtgtaggtgaaggtttaagagagagctgttggggcattcaggtgagaagcgacttggcacactttcatttatagagagtttctcatagctgtagacaaacatgagctccggtggcttcttagctttctgcttgtaccaatacatagccctgtgccccatatgttgttcacatttcaaagacttcttatttgtcattcccatgaccaggtgttttggtgtctgggtaacttcagtgtctatgggaactgtaggaggaagagtgtctcagatgcctgagcgggctggcaaggc

SEQ ID NO: 54 - DNA, 495 bp, Artificial Sequence
  source: /note="Description of Artificial Sequence: Synthetic polynucleotide"
gcctccctcgcgccatcaggttccgaatcagatgcatttcccaggacagagtcctccctcatcgcacccctcctagagacccccagccttacctacaacggttaacctggtccccgaaccgaaggtgtagccatagtcgacgttccgaatcagatgctcactgctggcgcagagatacagggctgagtcttctggctgcagggcgtgtaggtgaaggtttaagagagagctgttggggcattcaggtgagaagcgacttggcacactttcatttatagagagtttctcatagctgtagacaaacatgagctccggtggcttcttagctttctgcttgtaccaatacatagccctgtgccccatatgttgttcacatttcaaagacttcttatttgtcattcccatgaccaggtgttttggtgtctgggtaacttcagtgtctatgggaactgtaggaggagttccgaatcagatgcctgagcgggctggcaaggc

SEQ ID NO: 55 - DNA, 495 bp, Artificial Sequence
  source: /note="Description of Artificial Sequence: Synthetic polynucleotide"
gcctccctcgcgccatcagcgttactttcagatgcctggattccagcccctttttgcaagttcccagctgtccagccttgacttactcacctacaacagtgagccaacttccctctccaaaatatatggtgtttcgtcgaccgttactttcagatgctcactgctggcgcagagatacagggctgagtcttctggctgcagggcgtgtaggtgaaggtttaagagagagctgttggggcattcaggtgagaagcgacttggcacactttcatttatagagagtttctcatagctgtagacaaacatgagctccggtggcttcttagctttctgcttgtaccaatacatagccctgtgccccatatgttgttcacatttcaaagacttcttatttgtcattcccatgaccaggtgttttggtgtctgggtaacttcagtgtctatgggaactgtaggaggacgttactttcagatgcctgagcgggctggcaaggc

SEQ ID NO: 56 - DNA, 495 bp, Artificial Sequence
  source: /note="Description of Artificial Sequence: Synthetic polynucleotide"
gcctccctcgcgccatcagtaggagactcagatgcctcctggaactccgaccttatgatacactatcccgaaagaagtcttttacatacccaagacagagagctgggttccactgccaaaaaacagtttttcattgtcgactaggagactcagatgctcactgctggcgcagagatacagggctgagtcttctggctgcagggcgtgtaggtgaaggtttaagagagagctgttggggcattcaggtgagaagcgacttggcacactttcatttatagagagtttctcatagctgtagacaaacatgagctccggtggcttcttagctttctgcttgtaccaatacatagccctgtgccccatatgttgttcacatttcaaagacttcttatttgtcattcccatgaccaggtgttttggtgtctgggtaacttcagtgtctatgggaactgtaggaggataggagactcagatgcctgagcgggctggcaaggc

SEQ ID NO: 57 - DNA, 495 bp, Artificial Sequence
  source: /note="Description of Artificial Sequence: Synthetic polynucleotide"
gcctccctcgcgccatcaggacactcttcagatgcagagaactctgccttcaagggacaatggccataccaccctgattctgcaacttacctaggatggagagtcgagtcccatcaccaaaatgctggggctgatgtcgacgacactcttcagatgctcactgctggcgcagagatacagggctgagtcttctggctgcagggcgtgtaggtgaaggtttaagagagagctgttggggcattcaggtgagaagcgacttggcacactttcatttatagagagtttctcatagctgtagacaaacatgagctccggtggcttcttagctttctgcttgtaccaatacatagccctgtgccccatatgttgttcacatttcaaagacttcttatttgtcattcccatgaccaggtgttttggtgtctgggtaacttcagtgtctatgggaactgtaggaggagacactcttcagatgcctgagcgggctggcaaggc

SEQ ID NO: 58 - DNA, 495 bp, Artificial Sequence
  source: /note="Description of Artificial Sequence: Synthetic polynucleotide"
gcctccctcgcgccatcagttcggaactcagatgcatcattgcagtcaaacccaggcacccccgagtcaagagtggagcccccatacctgtcacagtgagcctggtcccgttcccaaagtggaggggtgaattatgtcgacttcggaactcagatgctcactgctggcgcagagatacagggctgagtcttctggctgcagggcgtgtaggtgaaggtttaagagagagctgttggggcattcaggtgagaagcgacttggcacactttcatttatagagagtttctcatagctgtagacaaacatgagctccggtggcttcttagctttctgcttgtaccaatacatagccctgtgccccatatgttgttcacatttcaaagacttcttatttgtcattcccatgaccaggtgttttggtgtctgggtaacttcagtgtctatgggaactgtaggaggattcggaactcagatgcctgagcgggctggcaaggc

SEQ ID NO: 59 - DNA, 495 bp, Artificial Sequence
  source: /note="Description of Artificial Sequence: Synthetic polynucleotide"
gcctccctcgcgccatcagaagtaacgtcagatgcgggtcgtgcaggctgggctgctcaccctctctcccacctggagcccccttcttacctagcacggtgagccgtgtccctggcccgaagaactgctcattgtgtcgacaagtaacgtcagatgctcactgctggcgcagagatacagggctgagtcttctggctgcagggcgtgtaggtgaaggtttaagagagagctgttggggcattcaggtgagaagcgacttggcacactttcatttatagagagtttctcatagctgtagacaaacatgagctccggtggcttcttagctttctgcttgtaccaatacatagccctgtgccccatatgttgttcacatttcaaagacttcttatttgtcattcccatgaccaggtgttttggtgtctgggtaacttcagtgtctatgggaactgtaggaggaaagtaacgtcagatgcctgagcgggctggcaaggc

SEQ ID NO: 60 - DNA, 495 bp, Artificial Sequence
  source: /note="Description of Artificial Sequence: Synthetic polynucleotide"
gcctccctcgcgccatcaggtctcctatcagatgccctctgcccatcccgccctctcggagctctccggagccccaaccgcctccttacccagtacggtcagcctagagccttctccaaaaaacagctccccggtgtcgacgtctcctatcagatgctcactgctggcgcagagatacagggctgagtcttctggctgcagggcgtgtaggtgaaggtttaagagagagctgttggggcattcaggtgagaagcgacttggcacactttcatttatagagagtttctcatagctgtagacaaacatgagctccggtggcttcttagctttctgcttgtaccaatacatagccctgtgccccatatgttgttcacatttcaaagacttcttatttgtcattcccatgaccaggtgttttggtgtctgggtaacttcagtgtctatgggaactgtaggaggagtctcctatcagatgcctgagcgggctggcaaggc

SEQ ID NO: 61 - DNA, 495 bp, Artificial Sequence
  source: /note="Description of Artificial Sequence: Synthetic polynucleotide"
gcctccctcgcgccatcaggtagacactcagatgcgcgtcccggggcgccccctccccagttccggggcttcagcgggagcccccgcttaccgagcactgtcagccgggtgcctgggccaaaatactgcgtatctgtcgacgtagacactcagatgctcactgctggcgcagagatacagggctgagtcttctggctgcagggcgtgtaggtgaaggtttaagagagagctgttggggcattcaggtgagaagcgacttggcacactttcatttatagagagtttctcatagctgtagacaaacatgagctccggtggcttcttagctttctgcttgtaccaatacatagccctgtgccccatatgttgttcacatttcaaagacttcttatttgtcattcccatgaccaggtgttttggtgtctgggtaacttcagtgtctatgggaactgtaggaggagtagacactcagatgcctgagcgggctggcaaggc

SEQ ID NO: 62 - DNA, 495 bp, Artificial Sequence
  source: /note="Description of Artificial Sequence: Synthetic polynucleotide"
gcctccctcgcgccatcagcactgtactcagatgccgcacaaaaacccgagcgcagtctcgtccccggtcccccggcggccccagcttacccagcactgagagccgggtcccggcgccgaagtactgaatgttttgtcgaccactgtactcagatgctcactgctggcgcagagatacagggctgagtcttctggctgcagggcgtgtaggtgaaggtttaagagagagctgttggggcattcaggtgagaagcgacttggcacactttcatttatagagagtttctcatagctgtagacaaacatgagctccggtggcttcttagctttctgcttgtaccaatacatagccctgtgccccatatgttgttcacatttcaaagacttcttatttgtcattcccatgaccaggtgttttggtgtctgggtaacttcagtgtctatgggaactgtaggaggacactgtactcagatgcctgagcgggctggcaaggc

SEQ ID NO: 63 - DNA, 495 bp, Artificial Sequence
  source: /note="Description of Artificial Sequence: Synthetic polynucleotide"
gcctccctcgcgccatcaggatgatcctcagatgcccccgcaaaaaccagacccaagccgcccgcgcccgcgccccagcagcccgcgctcaccgagcaccaggagccgcgtgcctggcccgaagtactgggtctcgtcgacgatgatcctcagatgctcactgctggcgcagagatacagggctgagtcttctggctgcagggcgtgtaggtgaaggtttaagagagagctgttggggcattcaggtgagaagcgacttggcacactttcatttatagagagtttctcatagctgtagacaaacatgagctccggtggcttcttagctttctgcttgtaccaatacatagccctgtgccccatatgttgttcacatttcaaagacttcttatttgtcattcccatgaccaggtgttttggtgtctgggtaacttcagtgtctatgggaactgtaggaggagatgatcctcagatgcctgagcgggctggcaaggc

SEQ ID NO: 64 - DNA, 495 bp, Artificial Sequence
  source: /note="Description of Artificial Sequence: Synthetic polynucleotide"
gcctccctcgcgccatcagcgccaatatcagatgcccgccgccttccacctgaatcccgccgcccgggtggtcccgcgaaaactcacccagcacggtcagcctgctgccggccccgaaagtcaggacgttggcccgtcgaccgccaatatcagatgctcactgctggcgcagagatacagggctgagtcttctggctgcagggcgtgtaggtgaaggtttaagagagagctgttggggcattcaggtgagaagcgacttggcacactttcatttatagagagtttctcatagctgtagacaaacatgagctccggtggcttcttagctttctgcttgtaccaatacatagccctgtgccccatatgttgttcacatttcaaagacttcttatttgtcattcccatgaccaggtgttttggtgtctgggtaacttcagtgtctatgggaactgtaggaggacgccaatatcagatgcctgagcgggctggcaaggc

SEQ ID NO: 65 - DNA, 495 bp, Artificial Sequence
  source: /note="Description of Artificial Sequence: Synthetic polynucleotide"
gcctccctcgcgccatcagtcaagccttcagatgcccaccctccgactccggggaccgaggggctggaaggtggggagacgcccgaatctcacctgtgaccgtgagcctggtgcccggcccgaagtactgctcgtgtcgactcaagccttcagatgctcactgctggcgcagagatacagggctgagtcttctggctgcagggcgtgtaggtgaaggtttaagagagagctgttggggcattcaggtgagaagcgacttggcacactttcatttatagagagtttctcatagctgtagacaaacatgagctccggtggcttcttagctttctgcttgtaccaatacatagccctgtgccccatatgttgttcacatttcaaagacttcttatttgtcattcccatgaccaggtgttttggtgtctgggtaacttcagtgtctatgggaactgtaggaggatcaagccttcagatgcctgagcgggctggcaaggc

SEQ ID NO: 66 - DNA, 495 bp, Artificial Sequence
  source: /note="Description of Artificial Sequence: Synthetic polynucleotide"
gcctccctcgcgccatcagagagtgtcgtgtagcactgtggacccacttttccctgtgacggatctgcaaaagaacctgaaaaatgtcttacctacaactgtgagtctggtgccttgtccaaagaaagcttcagtgtcgacagagtgtcgtgtagcatcactgctggcacagagatacagggccgagtcttctggctgcagggtgtgtaggtgaaggaataagtgagagctgttggggcattcaggtgagaagcgacttggcacactgttgttttcagtctgttctttaaagttgtagacaaacatgagctccagtggcttcttagcactttgcttgtaccaatacatagcgttatgccccagatgttgttcacatttcaaagacttcttatttgtcattcccatgaccaggtgtcttggtgtctgcgtaactcccgtttccatggggactgcggggggaagagtgtcgtgtagcactgagcgggctggcaaggc

SEQ ID NO: 67 - DNA, 495 bp, Artificial Sequence
  source: /note="Description of Artificial Sequence: Synthetic polynucleotide"
gcctccctcgcgccatcaggttccgaagtgtagcaatttcccaggacagagtcctccctcatcgcacccctcctagagacccccagccttacctacaacggttaacctggtccccgaaccgaaggtgtagccatagtcgacgttccgaagtgtagcatcactgctggcacagagatacagggccgagtcttctggctgcagggtgtgtaggtgaaggaataagtgagagctgttggggcattcaggtgagaagcgacttggcacactgttgttttcagtctgttctttaaagttgtagacaaacatgagctccagtggcttcttagcactttgcttgtaccaatacatagcgttatgccccagatgttgttcacatttcaaagacttcttatttgtcattcccatgaccaggtgtcttggtgtctgcgtaactcccgtttccatggggactgcggggggagttccgaagtgtagcactgagcgggctggcaaggc

SEQ ID NO: 68 - DNA, 495 bp, Artificial Sequence
  source: /note="Description of Artificial Sequence: Synthetic polynucleotide"
gcctccctcgcgccatcagcgttacttgtgtagcactggattccagcccctttttgcaagttcccagctgtccagccttgacttactcacctacaacagtgagccaacttccctctccaaaatatatggtgtttcgtcgaccgttacttgtgtagcatcactgctggcacagagatacagggccgagtcttctggctgcagggtgtgtaggtgaaggaataagtgagagctgttggggcattcaggtgagaagcgacttggcacactgttgttttcagtctgttctttaaagttgtagacaaacatgagctccagtggcttcttagcactttgcttgtaccaatacatagcgttatgccccagatgttgttcacatttcaaagacttcttatttgtcattcccatgaccaggtgtcttggtgtctgcgtaactcccgtttccatggggactgcggggggacgttacttgtgtagcactgagcgggctggcaaggc

SEQ ID NO: 69 - DNA, 495 bp, Artificial Sequence
  source: /note="Description of Artificial Sequence: Synthetic polynucleotide"
gcctccctcgcgccatcagtaggagacgtgtagcactcctggaactccgaccttatgatacactatcccgaaagaagtcttttacatacccaagacagagagctgggttccactgccaaaaaacagtttttcattgtcgactaggagacgtgtagcatcactgctggcacagagatacagggccgagtcttctggctgcagggtgtgtaggtgaaggaataagtgagagctgttggggcattcaggtgagaagcgacttggcacactgttgttttcagtctgttctttaaagttgtagacaaacatgagctccagtggcttcttagcactttgcttgtaccaatacatagcgttatgccccagatgttgttcacatttcaaagacttcttatttgtcattcccatgaccaggtgtcttggtgtctgcgtaactcccgtttccatggggactgcggggggataggagacgtgtagcactgagcgggctggcaaggc

SEQ ID NO: 70 - DNA, 495 bp, Artificial Sequence
  source: /note="Description of Artificial Sequence: Synthetic polynucleotide"
gcctccctcgcgccatcaggacactctgtgtagcaagagaactctgccttcaagggacaatggccataccaccctgattctgcaacttacctaggatggagagtcgagtcccatcaccaaaatgctggggctgatgtcgacgacactctgtgtagcatcactgctggcacagagatacagggccgagtcttctggctgcagggtgtgtaggtgaaggaataagtgagagctgttggggcattcaggtgagaagcgacttggcacactgttgttttcagtctgttctttaaagttgtagacaaacatgagctccagtggcttcttagcactttgcttgtaccaatacatagcgttatgccccagatgttgttcacatttcaaagacttcttatttgtcattcccatgaccaggtgtcttggtgtctgcgtaactcccgtttccatggggactgcggggggagacactctgtgtagcactgagcgggctggcaaggc

SEQ ID NO: 71 - DNA, 495 bp, Artificial Sequence
  source: /note="Description of Artificial Sequence: Synthetic polynucleotide"
gcctccctcgcgccatcagttcggaacgtgtagcaatcattgcagtcaaacccaggcacccccgagtcaagagtggagcccccatacctgtcacagtgagcctggtcccgttcccaaagtggaggggtgaattatgtcgacttcggaacgtgtagcatcactgctggcacagagatacagggccgagtcttctggctgcagggtgtgtaggtgaaggaataagtgagagctgttggggcattcaggtgagaagcgacttggcacactgttgttttcagtctgttctttaaagttgtagacaaacatgagctccagtggcttcttagcactttgcttgtaccaatacatagcgttatgccccagatgttgttcacatttcaaagacttcttatttgtcattcccatgaccaggtgtcttggtgtctgcgtaactcccgtttccatggggactgcggggggattcggaacgtgtagcactgagcgggctggcaaggc

SEQ ID NO: 72 - DNA, 495 bp, Artificial Sequence
  source: /note="Description of Artificial Sequence: Synthetic polynucleotide"
gcctccctcgcgccatcagaagtaacggtgtagcagggtcgtgcaggctgggctgctcaccctctctcccacctggagcccccttcttacctagcacggtgagccgtgtccctggcccgaagaactgctcattgtgtcgacaagtaacggtgtagcatcactgctggcacagagatacagggccgagtcttctggctgcagggtgtgtaggtgaaggaataagtgagagctgttggggcattcaggtgagaagcgacttggcacactgttgttttcagtctgttctttaaagttgtagacaaacatgagctccagtggcttcttagcactttgcttgtaccaatacatagcgttatgccccagatgttgttcacatttcaaagacttcttatttgtcattcccatgaccaggtgtcttggtgtctgcgtaactcccgtttccatggggactgcggggggaaagtaacggtgtagcactgagcgggctggcaaggc

SEQ ID NO: 73 - DNA, 495 bp, Artificial Sequence
  source: /note="Description of Artificial Sequence: Synthetic polynucleotide"
gcctccctcgcgccatcaggtctcctagtgtagcacctctgcccatcccgccctctcggagctctccggagccccaaccgcctccttacccagtacggtcagcctagagccttctccaaaaaacagctccccggtgtcgacgtctcctagtgtagcatcactgctggcacagagatacagggccgagtcttctggctgcagggtgtgtaggtgaaggaataagtgagagctgttggggcattcaggtgagaagcgacttggcacactgttgttttcagtctgttctttaaagttgtagacaaacatgagctccagtggcttcttagcactttgcttgtaccaatacatagcgttatgccccagatgttgttcacatttcaaagacttcttatttgtcattcccatgaccaggtgtcttggtgtctgcgtaactcccgtttccatggggactgcggggggagtctcctagtgtagcactgagcgggctggcaaggc

SEQ ID NO: 74 - DNA, 495 bp, Artificial Sequence
  source: /note="Description of Artificial Sequence: Synthetic polynucleotide"
gcctccctcgcgccatcaggtagacacgtgtagcagcgtcccggggcgccccctccccagttccggggcttcagcgggagcccccgcttaccgagcactgtcagccgggtgcctgggccaaaatactgcgtatctgtcgacgtagacacgtgtagcatcactgctggcacagagatacagggccgagtcttctggctgcagggtgtgtaggtgaaggaataagtgagagctgttggggcattcaggtgagaagcgacttggcacactgttgttttcagtctgttctttaaagttgtagacaaacatgagctccagtggcttcttagcactttgcttgtaccaatacatagcgttatgccccagatgttgttcacatttcaaagacttcttatttgtcattcccatgaccaggtgtcttggtgtctgcgtaactcccgtttccatggggactgcggggggagtagacacgtgtagcactgagcgggctggcaaggc

SEQ ID NO: 75 - DNA, 495 bp, Artificial Sequence
  source: /note="Description of Artificial Sequence: Synthetic polynucleotide"
gcctccctcgcgccatcagcactgtacgtgtagcacgcacaaaaacccgagcgcagtctcgtccccggtcccccggcggccccagcttacccagcactgagagccgggtcccggcgccgaagtactgaatgttttgtcgaccactgtacgtgtagcatcactgctggcacagagatacagggccgagtcttctggctgcagggtgtgtaggtgaaggaataagtgagagctgttggggcattcaggtgagaagcgacttggcacactgttgttttcagtctgttctttaaagttgtagacaaacatgagctccagtggcttcttagcactttgcttgtaccaatacatagcgttatgccccagatgttgttcacatttcaaagacttcttatttgtcattcccatgaccaggtgtcttggtgtctgcgtaactcccgtttccatggggactgcggggggacactgtacgtgtagcactgagcgggctggcaaggc

SEQ ID NO: 76 - DNA, 495 bp, Artificial Sequence
  source: /note="Description of Artificial Sequence: Synthetic polynucleotide"
gcctccctcgcgccatcaggatgatccgtgtagcaccccgcaaaaaccagacccaagccgcccgcgcccgcgccccagcagcccgcgctcaccgagcaccaggagccgcgtgcctggcccgaagtactgggtctcgtcgacgatgatccgtgtagcatcactgctggcacagagatacagggccgagtcttctggctgcagggtgtgtaggtgaaggaataagtgagagctgttggggcattcaggtgagaagcgacttggcacactgttgttttcagtctgttctttaaagttgtagacaaacatgagctccagtggcttcttagcactttgcttgtaccaatacatagcgttatgccccagatgttgttcacatttcaaagacttcttatttgtcattcccatgaccaggtgtcttggtgtctgcgtaactcccgtttccatggggactgcggggggagatgatccgtgtagcactgagcgggctggcaaggc

SEQ ID NO: 77 - DNA, 495 bp, Artificial Sequence
  source: /note="Description of Artificial Sequence: Synthetic polynucleotide"
gcctccctcgcgccatcagcgccaatagtgtagcaccgccgccttccacctgaatcccgccgcccgggtggtcccgcgaaaactcacccagcacggtcagcctgctgccggccccgaaagtcaggacgttggcccgtcgaccgccaatagtgtagcatcactgctggcacagagatacagggccgagtcttctggctgcagggtgtgtaggtgaaggaataagtgagagctgttggggcattcaggtgagaagcgacttggcacactgttgttttcagtctgttctttaaagttgtagacaaacatgagctccagtggcttcttagcactttgcttgtaccaatacatagcgttatgccccagatgttgttcacatttcaaagacttcttatttgtcattcccatgaccaggtgtcttggtgtctgcgtaactcccgtttccatggggactgcggggggacgccaatagtgtagcactgagcgggctggcaaggc

SEQ ID NO: 78 - DNA, 495 bp, Artificial Sequence
  source: /note="Description of Artificial Sequence: Synthetic polynucleotide"
gcctccctcgcgccatcagtcaagcctgtgtagcaccaccctccgactccggggaccgaggggctggaaggtggggagacgcccgaatctcacctgtgaccgtgagcctggtgcccggcccgaagtactgctcgtgtcgactcaagcctgtgtagcatcactgctggcacagagatacagggccgagtcttctggctgcagggtgtgtaggtgaaggaataagtgagagctgttggggcattcaggtgagaagcgacttggcacactgttgttttcagtctgttctttaaagttgtagacaaacatgagctccagtggcttcttagcactttgcttgtaccaatacatagcgttatgccccagatgttgttcacatttcaaagacttcttatttgtcattcccatgaccaggtgtcttggtgtctgcgtaactcccgtttccatggggactgcggggggatcaagcctgtgtagcactgagcgggctggcaaggc

SEQ ID NO: 79 - DNA, 495 bp, Artificial Sequence
  source: /note="Description of Artificial Sequence: Synthetic polynucleotide"
gcctccctcgcgccatcagagagtgtctggcagttctgtggacccacttttccctgtgacggatctgcaaaagaacctgaaaaatgtcttacctacaactgtgagtctggtgccttgtccaaagaaagcttcagtgtcgacagagtgtctggcagtttcactgctggcgcagagatacagggccgagtcttctggctgcagggtgtgtaggtgaaggaataagtgagagctgttggggcattcaggtgagaagcgacttggcacactgttgttttcaacccgttcttcaagactgtagacaaacatgagctccagtggcttcttagcactttgcttgtaccaatacatagcgttatgacccagatgttgttcacatttcaaagacttcttatttgtcattcccatgaccaggtgtcttggtgtctgcgtaactcccgtttccatggggactgtggggggaagagtgtctggcagttctgagcgggctggcaaggc

SEQ ID NO: 80 - DNA, 495 bp, Artificial Sequence
  source: /note="Description of Artificial Sequence: Synthetic polynucleotide"
gcctccctcgcgccatcaggttccgaatggcagttatttcccaggacagagtcctccctcatcgcacccctcctagagacccccagccttacctacaacggttaacctggtccccgaaccgaaggtgtagccatagtcgacgttccgaatggcagtttcactgctggcgcagagatacagggccgagtcttctggctgcagggtgtgtaggtgaaggaataagtgagagctgttggggcattcaggtgagaagcgacttggcacactgttgttttcaacccgttcttcaagactgtagacaaacatgagctccagtggcttcttagcactttgcttgtaccaatacatagcgttatgacccagatgttgttcacatttcaaagacttcttatttgtcattcccatgaccaggtgtcttggtgtctgcgtaactcccgtttccatggggactgtggggggagttccgaatggcagttctgagcgggctggcaaggc

SEQ ID NO: 81 - DNA, 495 bp, Artificial Sequence
  source: /note="Description of Artificial Sequence: Synthetic polynucleotide"
gcctccctcgcgccatcagcgttactttggcagttctggattccagcccctttttgcaagttcccagctgtccagccttgacttactcacctacaacagtgagccaacttccctctccaaaatatatggtgtttcgtcgaccgttactttggcagtttcactgctggcgcagagatacagggccgagtcttctggctgcagggtgtgtaggtgaaggaataagtgagagctgttggggcattcaggtgagaagcgacttggcacactgttgttttcaacccgttcttcaagactgtagacaaacatgagctccagtggcttcttagcactttgcttgtaccaatacatagcgttatgacccagatgttgttcacatttcaaagacttcttatttgtcattcccatgaccaggtgtcttggtgtctgcgtaactcccgtttccatggggactgtggggggacgttactttggcagttctgagcgggctggcaaggc

SEQ ID NO: 82 - DNA, 495 bp, Artificial Sequence
  source: /note="Description of Artificial Sequence: Synthetic polynucleotide"
gcctccctcgcgccatcagtaggagactggcagttctcctggaactccgaccttatgatacactatcccgaaagaagtcttttacatacccaagacagagagctgggttccactgccaaaaaacagtttttcattgtcgactaggagactggcagtttcactgctggcgcagagatacagggccgagtcttctggctgcagggtgtgtaggtgaaggaataagtgagagctgttggggcattcaggtgagaagcgacttggcacactgttgttttcaacccgttcttcaagactgtagacaaacatgagctccagtggcttcttagcactttgcttgtaccaatacatagcgttatgacccagatgttgttcacatttcaaagacttcttatttgtcattcccatgaccaggtgtcttggtgtctgcgtaactcccgtttccatggggactgtggggggataggagactggcagttctgagcgggctggcaaggc

SEQ ID NO: 83 - DNA, 495 bp, Artificial Sequence
  source: /note="Description of Artificial Sequence: Synthetic polynucleotide"
gcctccctcgcgccatcaggacactcttggcagttagagaactctgccttcaagggacaatggccataccaccctgattctgcaacttacctaggatggagagtcgagtcccatcaccaaaatgctggggctgatgtcgacgacactcttggcagtttcactgctggcgcagagatacagggccgagtcttctggctgcagggtgtgtaggtgaaggaataagtgagagctgttggggcattcaggtgagaagcgacttggcacactgttgttttcaacccgttcttcaagactgtagacaaacatgagctccagtggcttcttagcactttgcttgtaccaatacatagcgttatgacccagatgttgttcacatttcaaagacttcttatttgtcattcccatgaccaggtgtcttggtgtctgcgtaactcccgtttccatggggactgtggggggagacactcttggcagttctgagcgggctggcaaggc

SEQ ID NO: 84 - DNA, 495 bp, Artificial Sequence
  source: /note="Description of Artificial Sequence: Synthetic polynucleotide"
gcctccctcgcgccatcagttcggaactggcagttatcattgcagtcaaacccaggcacccccgagtcaagagtggagcccccatacctgtcacagtgagcctggtcccgttcccaaagtggaggggtgaattatgtcgacttcggaactggcagtttcactgctggcgcagagatacagggccgagtcttctggctgcagggtgtgtaggtgaaggaataagtgagagctgttggggcattcaggtgagaagcgacttggcacactgttgttttcaacccgttcttcaagactgtagacaaacatgagctccagtggcttcttagcactttgcttgtaccaatacatagcgttatgacccagatgttgttcacatttcaaagacttcttatttgtcattcccatgaccaggtgtcttggtgtctgcgtaactcccgtttccatggggactgtggggggattcggaactggcagttctgagcgggctggcaaggc

SEQ ID NO: 85 - DNA, 495 bp, Artificial Sequence
  source: /note="Description of Artificial Sequence: Synthetic polynucleotide"
gcctccctcgcgccatcagaagtaacgtggcagttgggtcgtgcaggctgggctgctcaccctctctcccacctggagcccccttcttacctagcacggtgagccgtgtccctggcccgaagaactgctcattgtgtcgacaagtaacgtggcagtttcactgctggcgcagagatacagggccgagtcttctggctgcagggtgtgtaggtgaaggaataagtgagagctgttggggcattcaggtgagaagcgacttggcacactgttgttttcaacccgttcttcaagactgtagacaaacatgagctccagtggcttcttagcactttgcttgtaccaatacatagcgttatgacccagatgttgttcacatttcaaagacttcttatttgtcattcccatgaccaggtgtcttggtgtctgcgtaactcccgtttccatggggactgtggggggaaagtaacgtggcagttctgagcgggctggcaaggc

SEQ ID NO: 86 - DNA, 495 bp, Artificial Sequence
  source: /note="Description of Artificial Sequence: Synthetic polynucleotide"
gcctccctcgcgccatcaggtctcctatggcagttcctctgcccatcccgccctctcggagctctccggagccccaaccgcctccttacccagtacggtcagcctagagccttctccaaaaaacagctccccggtgtcgacgtctcctatggcagtttcactgctggcgcagagatacagggccgagtcttctggctgcagggtgtgtaggtgaaggaataagtgagagctgttggggcattcaggtgagaagcgacttggcacactgttgttttcaacccgttcttcaagactgtagacaaacatgagctccagtggcttcttagcactttgcttgtaccaatacatagcgttatgacccagatgttgttcacatttcaaagacttcttatttgtcattcccatgaccaggtgtcttggtgtctgcgtaactcccgtttccatggggactgtggggggagtctcctatggcagttctgagcgggctggcaaggc

SEQ ID NO: 87 - DNA, 495 bp, Artificial Sequence
  source: /note="Description of Artificial Sequence: Synthetic polynucleotide"
gcctccctcgcgccatcaggtagacactggcagttgcgtcccggggcgccccctccccagttccggggcttcagcgggagcccccgcttaccgagcactgtcagccgggtgcctgggccaaaatactgcgtatctgtcgacgtagacactggcagtttcactgctggcgcagagatacagggccgagtcttctggctgcagggtgtgtaggtgaaggaataagtgagagctgttggggcattcaggtgagaagcgacttggcacactgttgttttcaacccgttcttcaagactgtagacaaacatgagctccagtggcttcttagcactttgcttgtaccaatacatagcgttatgacccagatgttgttcacatttcaaagacttcttatttgtcattcccatgaccaggtgtcttggtgtctgcgtaactcccgtttccatggggactgtggggggagtagacactggcagttctgagcgggctggcaaggc

SEQ ID NO: 88 - DNA, 495 bp, Artificial Sequence
  source: /note="Description of Artificial Sequence: Synthetic polynucleotide"
gcctccctcgcgccatcagcactgtactggcagttcgcacaaaaacccgagcgcagtctcgtccccggtcccccggcggccccagcttacccagcactgagagccgggtcccggcgccgaagtactgaatgttttgtcgaccactgtactggcagtttcactgctggcgcagagatacagggccgagtcttctggctgcagggtgtgtaggtgaaggaataagtgagagctgttggggcattcaggtgagaagcgacttggcacactgttgttttcaacccgttcttcaagactgtagacaaacatgagctccagtggcttcttagcactttgcttgtaccaatacatagcgttatgacccagatgttgttcacatttcaaagacttcttatttgtcattcccatgaccaggtgtcttggtgtctgcgtaactcccgtttccatggggactgtggggggacactgtactggcagttctgagcgggctggcaaggc

SEQ ID NO: 89 - DNA, 495 bp, Artificial Sequence
  source: /note="Description of Artificial Sequence: Synthetic polynucleotide"
gcctccctcgcgccatcaggatgatcctggcagttccccgcaaaaaccagacccaagccgcccgcgcccgcgccccagcagcccgcgctcaccgagcaccaggagccgcgtgcctggcccgaagtactgggtctcgtcgacgatgatcctggcagtttcactgctggcgcagagatacagggccgagtcttctggctgcagggtgtgtaggtgaaggaataagtgagagctgttggggcattcaggtgagaagcgacttggcacactgttgttttcaacccgttcttcaagactgtagacaaacatgagctccagtggcttcttagcactttgcttgtaccaatacatagcgttatgacccagatgttgttcacatttcaaagacttcttatttgtcattcccatgaccaggtgtcttggtgtctgcgtaactcccgtttccatggggactgtggggggagatgatcctggcagttctgagcgggctggcaaggc

SEQ ID NO: 90 - DNA, 495 bp, Artificial Sequence
  source: /note="Description of Artificial Sequence: Synthetic polynucleotide"
gcctccctcgcgccatcagcgccaatatggcagttccgccgccttccacctgaatcccgccgcccgggtggtcccgcgaaaactcacccagcacggtcagcctgctgccggccccgaaagtcaggacgttggcccgtcgaccgccaatatggcagtttcactgctggcgcagagatacagggccgagtcttctggctgcagggtgtgtaggtgaaggaataagtgagagctgttggggcattcaggtgagaagcgacttggcacactgttgttttcaacccgttcttcaagactgtagacaaacatgagctccagtggcttcttagcactttgcttgtaccaatacatagcgttatgacccagatgttgttcacatttcaaagacttcttatttgtcattcccatgaccaggtgtcttggtgtctgcgtaactcccgtttccatggggactgtggggggacgccaatatggcagttctgagcgggctggcaaggc

SEQ ID NO: 91 - DNA, 495 bp, Artificial Sequence
  source: /note="Description of Artificial Sequence: Synthetic polynucleotide"
gcctccctcgcgccatcagtcaagccttggcagttccaccctccgactccggggaccgaggggctggaaggtggggagacgcccgaatctcacctgtgaccgtgagcctggtgcccggcccgaagtactgctcgtgtcgactcaagccttggcagtttcactgctggcgcagagatacagggccgagtcttctggctgcagggtgtgtaggtgaaggaataagtgagagctgttggggcattcaggtgagaagcgacttggcacactgttgttttcaacccgttcttcaagactgtagacaaacatgagctccagtggcttcttagcactttgcttgtaccaatacatagcgttatgacccagatgttgttcacatttcaaagacttcttatttgtcattcccatgaccaggtgtcttggtgtctgcgtaactcccgtttccatggggactgtggggggatcaagccttggcagttctgagcgggctggcaaggc

SEQ ID NO: 92 - DNA, 495 bp, Artificial Sequence
  source: /note="Description of Artificial Sequence: Synthetic polynucleotide"
gcctccctcgcgccatcagagagtgtccagtccaactgtggacccacttttccctgtgacggatctgcaaaagaacctgaaaaatgtcttacctacaactgtgagtctggtgccttgtccaaagaaagcttcagtgtcgacagagtgtccagtccaatcatgctggcgcaaagataaagggccgagtcccccagctccaaggtgctcacattcatctcagagcgagagttagagaactggcgccctgagaatcgaccagggaagtttcctttgtttctctgtgtctcactgaagtattcaaagaggaactgaaggccctgtcctggggtctgttggtaccaggatacactcctatgcccagagataggggagcagctcagtgtcacttgctgtcctctcgttttgatcagatatcttggagtttgagtgactccagcctttactgggcctgtgggaaaagagagtgtccagtccaactgagcgggctggcaaggc

SEQ ID NO: 93 - DNA, 495 bp, Artificial Sequence
  source: /note="Description of Artificial Sequence: Synthetic polynucleotide"
gcctccctcgcgccatcaggttccgaacagtccaaatttcccaggacagagtcctccctcatcgcacccctcctagagacccccagccttacctacaacggttaacctggtccccgaaccgaaggtgtagccatagtcgacgttccgaacagtccaatcatgctggcgcaaagataaagggccgagtcccccagctccaaggtgctcacattcatctcagagcgagagttagagaactggcgccctgagaatcgaccagggaagtttcctttgtttctctgtgtctcactgaagtattcaaagaggaactgaaggccctgtcctggggtctgttggtaccaggatacactcctatgcccagagataggggagcagctcagtgtcacttgctgtcctctcgttttgatcagatatcttggagtttgagtgactccagcctttactgggcctgtgggaaaaggttccgaacagtccaactgagcgggctggcaaggc

SEQ ID NO: 94 - DNA, 495 bp, Artificial Sequence
  source: /note="Description of Artificial Sequence: Synthetic polynucleotide"
gcctccctcgcgccatcagcgttacttcagtccaactggattccagcccctttttgcaagttcccagctgtccagccttgacttactcacctacaacagtgagccaacttccctctccaaaatatatggtgtttcgtcgaccgttacttcagtccaatcatgctggcgcaaagataaagggccgagtcccccagctccaaggtgctcacattcatctcagagcgagagttagagaactggcgccctgagaatcgaccagggaagtttcctttgtttctctgtgtctcactgaagtattcaaagaggaactgaaggccctgtcctggggtctgttggtaccaggatacactcctatgcccagagataggggagcagctcagtgtcacttgctgtcctctcgttttgatcagatatcttggagtttgagtgactccagcctttactgggcctgtgggaaaagcgttacttcagtccaactgagcgggctggcaaggc

SEQ ID NO: 95 - DNA, 495 bp, Artificial Sequence
  source: /note="Description of Artificial Sequence: Synthetic polynucleotide"
gcctccctcgcgccatcagtaggagaccagtccaactcctggaactccgaccttatgatacactatcccgaaagaagtcttttacatacccaagacagagagctgggttccactgccaaaaaacagtttttcattgtcgactaggagaccagtccaatcatgctggcgcaaagataaagggccgagtcccccagctccaaggtgctcacattcatctcagagcgagagttagagaactggcgccctgagaatcgaccagggaagtttcctttgtttctctgtgtctcactgaagtattcaaagaggaactgaaggccctgtcctggggtctgttggtaccaggatacactcctatgcccagagataggggagcagctcagtgtcacttgctgtcctctcgttttgatcagatatcttggagtttgagtgactccagcctttactgggcctgtgggaaaagtaggagaccagtccaactgagcgggctggcaaggc

SEQ ID NO: 96 - DNA, 495 bp, Artificial Sequence
  source: /note="Description of Artificial Sequence: Synthetic polynucleotide"
gcctccctcgcgccatcaggacactctcagtccaaagagaactctgccttcaagggacaatggccataccaccctgattctgcaacttacctaggatggagagtcgagtcccatcaccaaaatgctggggctgatgtcgacgacactctcagtccaatcatgctggcgcaaagataaagggccgagtcccccagctccaaggtgctcacattcatctcagagcgagagttagagaactggcgccctgagaatcgaccagggaagtttcctttgtttctctgtgtctcactgaagtattcaaagaggaactgaaggccctgtcctggggtctgttggtaccaggatacactcctatgcccagagataggggagcagctcagtgtcacttgctgtcctctcgttttgatcagatatcttggagtttgagtgactccagcctttactgggcctgtgggaaaaggacactctcagtccaactgagcgggctggcaaggc

SEQ ID NO: 97 - DNA, 495 bp, Artificial Sequence
  source: /note="Description of Artificial Sequence: Synthetic polynucleotide"
gcctccctcgcgccatcagttcggaaccagtccaaatcattgcagtcaaacccaggcacccccgagtcaagagtggagcccccatacctgtcacagtgagcctggtcccgttcccaaagtggaggggtgaattatgtcgacttcggaaccagtccaatcatgctggcgcaaagataaagggccgagtcccccagctccaaggtgctcacattcatctcagagcgagagttagagaactggcgccctgagaatcgaccagggaagtttcctttgtttctctgtgtctcactgaagtattcaaagaggaactgaaggccctgtcctggggtctgttggtaccaggatacactcctatgcccagagataggggagcagctcagtgtcacttgctgtcctctcgttttgatcagatatcttggagtttgagtgactccagcctttactgggcctgtgggaaaagttcggaaccagtccaactgagcgggctggcaaggc

SEQ ID NO: 98 - DNA, 495 bp, Artificial Sequence
  source: /note="Description of Artificial Sequence: Synthetic polynucleotide"
gcctccctcgcgccatcagaagtaacgcagtccaagggtcgtgcaggctgggctgctcaccctctctcccacctggagcccccttcttacctagcacggtgagccgtgtccctggcccgaagaactgctcattgtgtcgacaagtaacgcagtccaatcatgctggcgcaaagataaagggccgagtcccccagctccaaggtgctcacattcatctcagagcgagagttagagaactggcgccctgagaatcgaccagggaagtttcctttgtttctctgtgtctcactgaagtattcaaagaggaactgaaggccctgtcctggggtctgttggtaccaggatacactcctatgcccagagataggggagcagctcagtgtcacttgctgtcctctcgttttgatcagatatcttggagtttgagtgactccagcctttactgggcctgtgggaaaagaagtaacgcagtccaactgagcgggctggcaaggc

SEQ ID NO: 99 - DNA, 495 bp, Artificial Sequence
  source: /note="Description of Artificial Sequence: Synthetic polynucleotide"
gcctccctcgcgccatcaggtctcctacagtccaacctctgcccatcccgccctctcggagctctccggagccccaaccgcctccttacccagtacggtcagcctagagccttctccaaaaaacagctccccggtgtcgacgtctcctacagtccaatcatgctggcgcaaagataaagggccgagtcccccagctccaaggtgctcacattcatctcagagcgagagttagagaactggcgccctgagaatcgaccagggaagtttcctttgtttctctgtgtctcactgaagtattcaaagaggaactgaaggccctgtcctggggtctgttggtaccaggatacactcctatgcccagagataggggagcagctcagtgtcacttgctgtcctctcgttttgatcagatatcttggagtttgagtgactccagcctttactgggcctgtgggaaaaggtctcctacagtccaactgagcgggctggcaaggc

SEQ ID NO: 100 - DNA, 495 bp, Artificial Sequence
  source: /note="Description of Artificial Sequence: Synthetic polynucleotide"
gcctccctcgcgccatcaggtagacaccagtccaagcgtcccggggcgccccctccccagttccggggcttcagcgggagcccccgcttaccgagcactgtcagccgggtgcctgggccaaaatactgcgtatctgtcgacgtagacaccagtccaatcatgctggcgcaaagataaagggccgagtcccccagctccaaggtgctcacattcatctcagagcgagagttagagaactggcgccctgagaatcgaccagggaagtttcctttgtttctctgtgtctcactgaagtattcaaagaggaactgaaggccctgtcctggggtctgttggtaccaggatacactcctatgcccagagataggggagcagctcagtgtcacttgctgtcctctcgttttgatcagatatcttggagtttgagtgactccagcctttactgggcctgtgggaaaaggtagacaccagtccaactgagcgggctggcaaggc

SEQ ID NO: 101 - DNA, 495 bp, Artificial Sequence
  source: /note="Description of Artificial Sequence: Synthetic polynucleotide"
gcctccctcgcgccatcagcactgtaccagtccaacgcacaaaaacccgagcgcagtctcgtccccggtcccccggcggccccagcttacccagcactgagagccgggtcccggcgccgaagtactgaatgttttgtcgaccactgtaccagtccaatcatgctggcgcaaagataaagggccgagtcccccagctccaaggtgctcacattcatctcagagcgagagttagagaactggcgccctgagaatcgaccagggaagtttcctttgtttctctgtgtctcactgaagtattcaaagaggaactgaaggccctgtcctggggtctgttggtaccaggatacactcctatgcccagagataggggagcagctcagtgtcacttgctgtcctctcgttttgatcagatatcttggagtttgagtgactccagcctttactgggcctgtgggaaaagcactgtaccagtccaactgagcgggctggcaaggc

SEQ ID NO: 102 - DNA, 495 bp, Artificial Sequence
  source: /note="Description of Artificial Sequence: Synthetic polynucleotide"
gcctccctcgcgccatcaggatgatcccagtccaaccccgcaaaaaccagacccaagccgcccgcgcccgcgccccagcagcccgcgctcaccgagcaccaggagccgcgtgcctggcccgaagtactgggtctcgtcgacgatgatcccagtccaatcatgctggcgcaaagataaagggccgagtcccccagctccaaggtgctcacattcatctcagagcgagagttagagaactggcgccctgagaatcgaccagggaagtttcctttgtttctctgtgtctcactgaagtattcaaagaggaactgaaggccctgtcctggggtctgttggtaccaggatacactcctatgcccagagataggggagcagctcagtgtcacttgctgtcctctcgttttgatcagatatcttggagtttgagtgactccagcctttactgggcctgtgggaaaaggatgatcccagtccaactgagcgggctggcaaggc

SEQ ID NO: 103 - DNA, 495 bp, Artificial Sequence
  source: /note="Description of Artificial Sequence: Synthetic polynucleotide"
gcctccctcgcgccatcagcgccaatacagtccaaccgccgccttccacctgaatcccgccgcccgggtggtcccgcgaaaactcacccagcacggtcagcctgctgccggccccgaaagtcaggacgttggcccgtcgaccgccaatacagtccaatcatgctggcgcaaagataaagggccgagtcccccagctccaaggtgctcacattcatctcagagcgagagttagagaactggcgccctgagaatcgaccagggaagtttcctttgtttctctgtgtctcactgaagtattcaaagaggaactgaaggccctgtcctggggtctgttggtaccaggatacactcctatgcccagagataggggagcagctcagtgtcacttgctgtcctctcgttttgatcagatatcttggagtttgagtgactccagcctttactgggcctgtgggaaaagcgccaatacagtccaactgagcgggctggcaaggc

SEQ ID NO: 104 - DNA, 495 bp, Artificial Sequence
  source: /note="Description of Artificial Sequence: Synthetic polynucleotide"
gcctccctcgcgccatcagtcaagcctcagtccaaccaccctccgactccggggaccgaggggctggaaggtggggagacgcccgaatctcacctgtgaccgtgagcctggtgcccggcccgaagtactgctcgtgtcgactcaagcctcagtccaatcatgctggcgcaaagataaagggccgagtcccccagctccaaggtgctcacattcatctcagagcgagagttagagaactggcgccctgagaatcgaccagggaagtttcctttgtttctctgtgtctcactgaagtattcaaagaggaactgaaggccctgtcctggggtctgttggtaccaggatacactcctatgcccagagataggggagcagctcagtgtcacttgctgtcctctcgttttgatcagatatcttggagtttgagtgactccagcctttactgggcctgtgggaaaagtcaagcctcagtccaactgagcgggctggcaaggc

SEQ ID NO: 105 - DNA, 495 bp, Artificial Sequence
  source: /note="Description of Artificial Sequence: Synthetic polynucleotide"
gcctccctcgcgccatcagagagtgtcgtgtctacctgtggacccacttttccctgtgacggatctgcaaaagaacctgaaaaatgtcttacctacaactgtgagtctggtgccttgtccaaagaaagcttcagtgtcgacagagtgtcgtgtctactcatgctggcacagagatacagggctgagtcccctagctccgtgtttgactcagtaatagttatggacgtggtgagctgagaatcaattaggcaagtttccttttgctctttgtaacctattacaatattgtaacaataactagaggggctgacttggagttcgtaggtaccaggacacacagttatgcccagaggcaggggagcatctcagtgtcacttgctggtctcttgttttgatcaggtgtcttggagcttgggtgattccagcctccactgggcctgaggaaaaaataggtggagaaagagtgtcgtgtctacctgagcgggctggcaaggc

SEQ ID NO: 106 - DNA, 495 bp, Artificial Sequence
  source: /note="Description of Artificial Sequence: Synthetic polynucleotide"
gcctccctcgcgccatcaggttccgaagtgtctacatttcccaggacagagtcctccctcatcgcacccctcctagagacccccagccttacctacaacggttaacctggtccccgaaccgaaggtgtagccatagtcgacgttccgaagtgtctactcatgctggcacagagatacagggctgagtcccctagctccgtgtttgactcagtaatagttatggacgtggtgagctgagaatcaattaggcaagtttccttttgctctttgtaacctattacaatattgtaacaataactagaggggctgacttggagttcgtaggtaccaggacacacagttatgcccagaggcaggggagcatctcagtgtcacttgctggtctcttgttttgatcaggtgtcttggagcttgggtgattccagcctccactgggcctgaggaaaaaataggtggagaagttccgaagtgtctacctgagcgggctggcaaggc

SEQ ID NO: 107 - DNA, 495 bp, Artificial Sequence
  source: /note="Description of Artificial Sequence: Synthetic polynucleotide"
gcctccctcgcgccatcagcgttacttgtgtctacctggattccagcccctttttgcaagttcccagctgtccagccttgacttactcacctacaacagtgagccaacttccctctccaaaatatatggtgtttcgtcgaccgttacttgtgtctactcatgctggcacagagatacagggctgagtcccctagctccgtgtttgactcagtaatagttatggacgtggtgagctgagaatcaattaggcaagtttccttttgctctttgtaacctattacaatattgtaacaataactagaggggctgacttggagttcgtaggtaccaggacacacagttatgcccagaggcaggggagcatctcagtgtcacttgctggtctcttgttttgatcaggtgtcttggagcttgggtgattccagcctccactgggcctgaggaaaaaataggtggagaacgttacttgtgtctacctgagcgggctggcaaggc

SEQ ID NO: 108 - DNA, 495 bp, Artificial Sequence
  source: /note="Description of Artificial Sequence: Synthetic polynucleotide"
gcctccctcgcgccatcagtaggagacgtgtctacctcctggaactccgaccttatgatacactatcccgaaagaagtcttttacatacccaagacagagagctgggttccactgccaaaaaacagtttttcattgtcgactaggagacgtgtctactcatgctggcacagagatacagggctgagtcccctagctccgtgtttgactcagtaatagttatggacgtggtgagctgagaatcaattaggcaagtttccttttgctctttgtaacctattacaatattgtaacaataactagaggggctgacttggagttcgtaggtaccaggacacacagttatgcccagaggcaggggagcatctcagtgtcacttgctggtctcttgttttgatcaggtgtcttggagcttgggtgattccagcctccactgggcctgaggaaaaaataggtggagaataggagacgtgtctacctgagcgggctggcaaggc

SEQ ID NO: 109 - DNA, 495 bp, Artificial Sequence
  source: /note="Description of Artificial Sequence: Synthetic polynucleotide"
gcctccctcgcgccatcaggacactctgtgtctacagagaactctgccttcaagggacaatggccataccaccctgattctgcaacttacctaggatggagagtcgagtcccatcaccaaaatgctggggctgatgtcgacgacactctgtgtctactcatgctggcacagagatacagggctgagtcccctagctccgtgtttgactcagtaatagttatggacgtggtgagctgagaatcaattaggcaagtttccttttgctctttgtaacctattacaatattgtaacaataactagaggggctgacttggagttcgtaggtaccaggacacacagttatgcccagaggcaggggagcatctcagtgtcacttgctggtctcttgttttgatcaggtgtcttggagcttgggtgattccagcctccactgggcctgaggaaaaaataggtggagaagacactctgtgtctacctgagcgggctggcaaggc

SEQ ID NO: 110 - DNA, 495 bp, Artificial Sequence
  source: /note="Description of Artificial Sequence: Synthetic polynucleotide"
gcctccctcgcgccatcagttcggaacgtgtctacatcattgcagtcaaacccaggcacccccgagtcaagagtggagcccccatacctgtcacagtgagcctggtcccgttcccaaagtggaggggtgaattatgtcgacttcggaacgtgtctactcatgctggcacagagatacagggctgagtcccctagctccgtgtttgactcagtaatagttatggacgtggtgagctgagaatcaattaggcaagtttccttttgctctttgtaacctattacaatattgtaacaataactagaggggctgacttggagttcgtaggtaccaggacacacagttatgcccagaggcaggggagcatctcagtgtcacttgctggtctcttgttttgatcaggtgtcttggagcttgggtgattccagcctccactgggcctgaggaaaaaataggtggagaattcggaacgtgtctacctgagcgggctggcaaggc

SEQ ID NO: 111 - DNA, 495 bp, Artificial Sequence
  source: /note="Description of Artificial Sequence: Synthetic polynucleotide"
gcctccctcgcgccatcagaagtaacggtgtctacgggtcgtgcaggctgggctgctcaccctctctcccacctggagcccccttcttacctagcacggtgagccgtgtccctggcccgaagaactgctcattgtgtcgacaagtaacggtgtctactcatgctggcacagagatacagggctgagtcccctagctccgtgtttgactcagtaatagttatggacgtggtgagctgagaatcaattaggcaagtttccttttgctctttgtaacctattacaatattgtaacaataactagaggggctgacttggagttcgtaggtaccaggacacacagttatgcccagaggcaggggagcatctcagtgtcacttgctggtctcttgttttgatcaggtgtcttggagcttgggtgattccagcctccactgggcctgaggaaaaaataggtggagaaaagtaacggtgtctacctgagcgggctggcaaggc

SEQ ID NO: 112 - DNA, 495 bp, Artificial Sequence
  source: /note="Description of Artificial Sequence: Synthetic polynucleotide"
gcctccctcgcgccatcaggtctcctagtgtctaccctctgcccatcccgccctctcggagctctccggagccccaaccgcctccttacccagtacggtcagcctagagccttctccaaaaaacagctccccggtgtcgacgtctcctagtgtctactcatgctggcacagagatacagggctgagtcccctagctccgtgtttgactcagtaatagttatggacgtggtgagctgagaatcaattaggcaagtttccttttgctctttgtaacctattacaatattgtaacaataactagaggggctgacttggagttcgtaggtaccaggacacacagttatgcccagaggcaggggagcatctcagtgtcacttgctggtctcttgttttgatcaggtgtcttggagcttgggtgattccagcctccactgggcctgaggaaaaaataggtggagaagtctcctagtgtctacctgagcgggctggcaaggc

SEQ ID NO: 113 - DNA, 495 bp, Artificial Sequence
  source: /note="Description of Artificial Sequence: Synthetic polynucleotide"
gcctccctcgcgccatcaggtagacacgtgtctacgcgtcccggggcgccccctccccagttccggggcttcagcgggagcccccgcttaccgagcactgtcagccgggtgcctgggccaaaatactgcgtatctgtcgacgtagacacgtgtctactcatgctggcacagagatacagggctgagtcccctagctccgtgtttgactcagtaatagttatggacgtggtgagctgagaatcaattaggcaagtttccttttgctctttgtaacctattacaatattgtaacaataactagaggggctgacttggagttcgtaggtaccaggacacacagttatgcccagaggcaggggagcatctcagtgtcacttgctggtctcttgttttgatcaggtgtcttggagcttgggtgattccagcctccactgggcctgaggaaaaaataggtggagaagtagacacgtgtctacctgagcgggctggcaaggc

SEQ ID NO: 114 - DNA, 495 bp, Artificial Sequence
  source: /note="Description of Artificial Sequence: Synthetic polynucleotide"
gcctccctcgcgccatcagcactgtacgtgtctaccgcacaaaaacccgagcgcagtctcgtccccggtcccccggcggccccagcttacccagcactgagagccgggtcccggcgccgaagtactgaatgttttgtcgaccactgtacgtgtctactcatgctggcacagagatacagggctgagtcccctagctccgtgtttgactcagtaatagttatggacgtggtgagctgagaatcaattaggcaagtttccttttgctctttgtaacctattacaatattgtaacaataactagaggggctgacttggagttcgtaggtaccaggacacacagttatgcccagaggcaggggagcatctcagtgtcacttgctggtctcttgttttgatcaggtgtcttggagcttgggtgattccagcctccactgggcctgaggaaaaaataggtggagaacactgtacgtgtctacctgagcgggctggcaaggc

SEQ ID NO: 115 - DNA, 495 bp, Artificial Sequence
  source: /note="Description of Artificial Sequence: Synthetic polynucleotide"
gcctccctcgcgccatcaggatgatccgtgtctacccccgcaaaaaccagacccaagccgcccgcgcccgcgccccagcagcccgcgctcaccgagcaccaggagccgcgtgcctggcccgaagtactgggtctcgtcgacgatgatccgtgtctactcatgctggcacagagatacagggctgagtcccctagctccgtgtttgactcagtaatagttatggacgtggtgagctgagaatcaattaggcaagtttccttttgctctttgtaacctattacaatattgtaacaataactagaggggctgacttggagttcgtaggtaccaggacacacagttatgcccagaggcaggggagcatctcagtgtcacttgctggtctcttgttttgatcaggtgtcttggagcttgggtgattccagcctccactgggcctgaggaaaaaataggtggagaagatgatccgtgtctacctgagcgggctggcaaggc

SEQ ID NO: 116 - DNA, 495 bp, Artificial Sequence
  source: /note="Description of Artificial Sequence: Synthetic polynucleotide"
gcctccctcgcgccatcagcgccaatagtgtctacccgccgccttccacctgaatcccgccgcccgggtggtcccgcgaaaactcacccagcacggtcagcctgctgccggccccgaaagtcaggacgttggcccgtcgaccgccaatagtgtctactcatgctggcacagagatacagggctgagtcccctagctccgtgtttgactcagtaatagttatggacgtggtgagctgagaatcaattaggcaagtttccttttgctctttgtaacctattacaatattgtaacaataactagaggggctgacttggagttcgtaggtaccaggacacacagttatgcccagaggcaggggagcatctcagtgtcacttgctggtctcttgttttgatcaggtgtcttggagcttgggtgattccagcctccactgggcctgaggaaaaaataggtggagaacgccaatagtgtctacctgagcgggctggcaaggc

SEQ ID NO: 117 - DNA, 495 bp, Artificial Sequence
  source: /note="Description of Artificial Sequence: Synthetic polynucleotide"
gcctccctcgcgccatcagtcaagcctgtgtctacccaccctccgactccggggaccgaggggctggaaggtggggagacgcccgaatctcacctgtgaccgtgagcctggtgcccggcccgaagtactgctcgtgtcgactcaagcctgtgtctactcatgctggcacagagatacagggctgagtcccctagctccgtgtttgactcagtaatagttatggacgtggtgagctgagaatcaattaggcaagtttccttttgctctttgtaacctattacaatattgtaacaataactagaggggctgacttggagttcgtaggtaccaggacacacagttatgcccagaggcaggggagcatctcagtgtcacttgctggtctcttgttttgatcaggtgtcttggagcttgggtgattccagcctccactgggcctgaggaaaaaataggtggagaatcaagcctgtgtctacctgagcgggctggcaaggc

SEQ ID NO: 118 - DNA, 495 bp, Artificial Sequence
  source: /note="Description of Artificial Sequence: Synthetic polynucleotide"
gcctccctcgcgccatcagagagtgtcgtacagtgctgtggacccacttttccctgtgacggatctgcaaaagaacctgaaaaatgtcttacctacaactgtgagtctggtgccttgtccaaagaaagcttcagtgtcgacagagtgtcgtacagtgtcattctggcacagagatacagggccgagtcccccagctccaaggcactcacattcatctcagagcaacagtcatggaactggcgccctgagaatcgattagggaagtttccttctgatctccttaactcattagcatattcaaagataaactggggcccctgacccggggcctgttggtaccaggacacactgctgtgcccagagataggagagcatctcagagtcacttgctgtcctctcgttttgatcaggtgtgtgggactttgggtgactccagcctccactgggcctgtgggaaaagagagtgtcgtacagtgctgagcgggctggcaaggc

SEQ ID NO: 119 - DNA, 495 bp, Artificial Sequence
  source: /note="Description of Artificial Sequence: Synthetic polynucleotide"
gcctccctcgcgccatcaggttccgaagtacagtgatttcccaggacagagtcctccctcatcgcacccctcctagagacccccagccttacctacaacggttaacctggtccccgaaccgaaggtgtagccatagtcgacgttccgaagtacagtgtcattctggcacagagatacagggccgagtcccccagctccaaggcactcacattcatctcagagcaacagtcatggaactggcgccctgagaatcgattagggaagtttccttctgatctccttaactcattagcatattcaaagataaactggggcccctgacccggggcctgttggtaccaggacacactgctgtgcccagagataggagagcatctcagagtcacttgctgtcctctcgttttgatcaggtgtgtgggactttgggtgactccagcctccactgggcctgtgggaaaaggttccgaagtacagtgctgagcgggctggcaaggc

SEQ ID NO: 120 - DNA, 495 bp, Artificial Sequence
  source: /note="Description of Artificial Sequence: Synthetic polynucleotide"
gcctccctcgcgccatcagcgttacttgtacagtgctggattccagcccctttttgcaagttcccagctgtccagccttgacttactcacctacaacagtgagccaacttccctctccaaaatatatggtgtttcgtcgaccgttacttgtacagtgtcattctggcacagagatacagggccgagtcccccagctccaaggcactcacattcatctcagagcaacagtcatggaactggcgccctgagaatcgattagggaagtttccttctgatctccttaactcattagcatattcaaagataaactggggcccctgacccggggcctgttggtaccaggacacactgctgtgcccagagataggagagcatctcagagtcacttgctgtcctctcgttttgatcaggtgtgtgggactttgggtgactccagcctccactgggcctgtgggaaaagcgttacttgtacagtgctgagcgggctggcaaggc

SEQ ID NO: 121 - DNA, 495 bp, Artificial Sequence
  source: /note="Description of Artificial Sequence: Synthetic polynucleotide"
gcctccctcgcgccatcagtaggagacgtacagtgctcctggaactccgaccttatgatacactatcccgaaagaagtcttttacatacccaagacagagagctgggttccactgccaaaaaacagtttttcattgtcgactaggagacgtacagtgtcattctggcacagagatacagggccgagtcccccagctccaaggcactcacattcatctcagagcaacagtcatggaactggcgccctgagaatcgattagggaagtttccttctgatctccttaactcattagcatattcaaagataaactggggcccctgacccggggcctgttggtaccaggacacactgctgtgcccagagataggagagcatctcagagtcacttgctgtcctctcgttttgatcaggtgtgtgggactttgggtgactccagcctccactgggcctgtgggaaaagtaggagacgtacagtgctgagcgggctggcaaggc

SEQ ID NO: 122 - DNA, 495 bp, Artificial Sequence
  source: /note="Description of Artificial Sequence: Synthetic polynucleotide"
gcctccctcgcgccatcaggacactctgtacagtgagagaactctgccttcaagggacaatggccataccaccctgattctgcaacttacctaggatggagagtcgagtcccatcaccaaaatgctggggctgatgtcgacgacactctgtacagtgtcattctggcacagagatacagggccgagtcccccagctccaaggcactcacattcatctcagagcaacagtcatggaactggcgccctgagaatcgattagggaagtttccttctgatctccttaactcattagcatattcaaagataaactggggcccctgacccggggcctgttggtaccaggacacactgctgtgcccagagataggagagcatctcagagtcacttgctgtcctctcgttttgatcaggtgtgtgggactttgggtgactccagcctccactgggcctgtgggaaaaggacactctgtacagtgctgagcgggctggcaaggc

SEQ ID NO: 123 - DNA, 495 bp, Artificial Sequence
  source: /note="Description of Artificial Sequence: Synthetic polynucleotide"
gcctccctcgcgccatcagttcggaacgtacagtgatcattgcagtcaaacccaggcacccccgagtcaagagtggagcccccatacctgtcacagtgagcctggtcccgttcccaaagtggaggggtgaattatgtcgacttcggaacgtacagtgtcattctggcacagagatacagggccgagtcccccagctccaaggcactcacattcatctcagagcaacagtcatggaactggcgccctgagaatcgattagggaagtttccttctgatctccttaactcattagcatattcaaagataaactggggcccctgacccggggcctgttggtaccaggacacactgctgtgcccagagataggagagcatctcagagtcacttgctgtcctctcgttttgatcaggtgtgtgggactttgggtgactccagcctccactgggcctgtgggaaaagttcggaacgtacagtgctgagcgggctggcaaggc

SEQ ID NO: 124 - DNA, 495 bp, Artificial Sequence
  source: /note="Description of Artificial Sequence: Synthetic polynucleotide"
gcctccctcgcgccatcagaagtaacggtacagtggggtcgtgcaggctgggctgctcaccctctctcccacctggagcccccttcttacctagcacggtgagccgtgtccctggcccgaagaactgctcattgtgtcgacaagtaacggtacagtgtcattctggcacagagatacagggccgagtcccccagctccaaggcactcacattcatctcagagcaacagtcatggaactggcgccctgagaatcgattagggaagtttccttctgatctccttaactcattagcatattcaaagataaactggggcccctgacccggggcctgttggtaccaggacacactgctgtgcccagagataggagagcatctcagagtcacttgctgtcctctcgttttgatcaggtgtgtgggactttgggtgactccagcctccactgggcctgtgggaaaagaagtaacggtacagtgctgagcgggctggcaaggc

SEQ ID NO: 125 - DNA, 495 bp, Artificial Sequence
  source: /note="Description of Artificial Sequence: Synthetic polynucleotide"
gcctccctcgcgccatcaggtctcctagtacagtgcctctgcccatcccgccctctcggagctctccggagccccaaccgcctccttacccagtacggtcagcctagagccttctccaaaaaacagctccccggtgtcgacgtctcctagtacagtgtcattctggcacagagatacagggccgagtcccccagctccaaggcactcacattcatctcagagcaacagtcatggaactggcgccctgagaatcgattagggaagtttccttctgatctccttaactcattagcatattcaaagataaactggggcccctgacccggggcctgttggtaccaggacacactgctgtgcccagagataggagagcatctcagagtcacttgctgtcctctcgttttgatcaggtgtgtgggactttgggtgactccagcctccactgggcctgtgggaaaaggtctcctagtacagtgctgagcgggctggcaaggc

SEQ ID NO: 126 - DNA, 495 bp, Artificial Sequence
  source: /note="Description of Artificial Sequence: Synthetic polynucleotide"
gcctccctcgcgccatcaggtagacacgtacagtggcgtcccggggcgccccctccccagttccggggcttcagcgggagcccccgcttaccgagcactgtcagccgggtgcctgggccaaaatactgcgtatctgtcgacgtagacacgtacagtgtcattctggcacagagatacagggccgagtcccccagctccaaggcactcacattcatctcagagcaacagtcatggaactggcgccctgagaatcgattagggaagtttccttctgatctccttaactcattagcatattcaaagataaactggggcccctgacccggggcctgttggtaccaggacacactgctgtgcccagagataggagagcatctcagagtcacttgctgtcctctcgttttgatcaggtgtgtgggactttgggtgactccagcctccactgggcctgtgggaaaaggtagacacgtacagtgctgagcgggctggcaaggc

SEQ ID NO: 127 - DNA, 495 bp, Artificial Sequence
  source: /note="Description of Artificial Sequence: Synthetic polynucleotide"
gcctccctcgcgccatcagcactgtacgtacagtgcgcacaaaaacccgagcgcagtctcgtccccggtcccccggcggccccagcttacccagcactgagagccgggtcccggcgccgaagtactgaatgttttgtcgaccactgtacgtacagtgtcattctggcacagagatacagggccgagtcccccagctccaaggcactcacattcatctcagagcaacagtcatggaactggcgccctgagaatcgattagggaagtttccttctgatctccttaactcattagcatattcaaagataaactggggcccctgacccggggcctgttggtaccaggacacactgctgtgcccagagataggagagcatctcagagtcacttgctgtcctctcgttttgatcaggtgtgtgggactttgggtgactccagcctccactgggcctgtgggaaaagcactgtacgtacagtgctgagcgggctggcaaggc

SEQ ID NO: 128 - DNA, 495 bp, Artificial Sequence
  source: /note="Description of Artificial Sequence: Synthetic polynucleotide"
gcctccctcgcgccatcaggatgatccgtacagtgccccgcaaaaaccagacccaagccgcccgcgcccgcgccccagcagcccgcgctcaccgagcaccaggagccgcgtgcctggcccgaagtactgggtctcgtcgacgatgatccgtacagtgtcattctggcacagagatacagggccgagtcccccagctccaaggcactcacattcatctcagagcaacagtcatggaactggcgccctgagaatcgattagggaagtttccttctgatctccttaactcattagcatattcaaagataaactggggcccctgacccggggcctgttggtaccaggacacactgctgtgcccagagataggagagcatctcagagtcacttgctgtcctctcgttttgatcaggtgtgtgggactttgggtgactccagcctccactgggcctgtgggaaaaggatgatccgtacagtgctgagcgggctggcaaggc

SEQ ID NO: 129 - DNA, 495 bp, Artificial Sequence
  source: /note="Description of Artificial Sequence: Synthetic polynucleotide"
gcctccctcgcgccatcagcgccaatagtacagtgccgccgccttccacctgaatcccgccgcccgggtggtcccgcgaaaactcacccagcacggtcagcctgctgccggccccgaaagtcaggacgttggcccgtcgaccgccaatagtacagtgtcattctggcacagagatacagggccgagtcccccagctccaaggcactcacattcatctcagagcaacagtcatggaactggcgccctgagaatcgattagggaagtttccttctgatctccttaactcattagcatattcaaagataaactggggcccctgacccggggcctgttggtaccaggacacactgctgtgcccagagataggagagcatctcagagtcacttgctgtcctctcgttttgatcaggtgtgtgggactttgggtgactccagcctccactgggcctgtgggaaaagcgccaatagtacagtgctgagcgggctggcaaggc

SEQ ID NO: 130 - DNA, 495 bp, Artificial Sequence
  source: /note="Description of Artificial Sequence: Synthetic polynucleotide"
gcctccctcgcgccatcagtcaagcctgtacagtgccaccctccgactccggggaccgaggggctggaaggtggggagacgcccgaatctcacctgtgaccgtgagcctggtgcccggcccgaagtactgctcgtgtcgactcaagcctgtacagtgtcattctggcacagagatacagggccgagtcccccagctccaaggcactcacattcatctcagagcaacagtcatggaactggcgccctgagaatcgattagggaagtttccttctgatctccttaactcattagcatattcaaagataaactggggcccctgacccggggcctgttggtaccaggacacactgctgtgcccagagataggagagcatctcagagtcacttgctgtcctctcgttttgatcaggtgtgtgggactttgggtgactccagcctccactgggcctgtgggaaaagtcaagcctgtacagtgctgagcgggctggcaaggc

SEQ ID NO: 131 - DNA, 495 bp, Artificial Sequence
  source: /note="Description of Artificial Sequence: Synthetic polynucleotide"
gcctccctcgcgccatcagagagtgtcggatcatcctgtggacccacttttccctgtgacggatctgcaaaagaacctgaaaaatgtcttacctacaactgtgagtctggtgccttgtccaaagaaagcttcagtgtcgacagagtgtcggatcatctcatgctggcacagagatacagggccgagtcgtccagctccaaggcgttcacattcagctcagagctataattagggaactggagacctgagaatctaggagggaagtttcctctgccattctcttcctccctataatactgaaagataaactggggcccctgacccagggcctgttggtaccaggacacagtgttgtgcccagactgagaagagcatctcagagtcacttgctgtcctctcgttttgatcaggtgtgtgggactttgggtgactccagtctccactgagcctgtgggaaaagagagtgtcggatcatcctgagcgggctggcaaggc

SEQ ID NO: 132 - DNA, 495 bp, Artificial Sequence
  source: /note="Description of Artificial Sequence: Synthetic polynucleotide"
gcctccctcgcgccatcaggttccgaaggatcatcatttcccaggacagagtcctccctcatcgcacccctcctagagacccccagccttacctacaacggttaacctggtccccgaaccgaaggtgtagccatagtcgacgttccgaaggatcatctcatgctggcacagagatacagggccgagtcgtccagctccaaggcgttcacattcagctcagagctataattagggaactggagacctgagaatctaggagggaagtttcctctgccattctcttcctccctataatactgaaagataaactggggcccctgacccagggcctgttggtaccaggacacagtgttgtgcccagactgagaagagcatctcagagtcacttgctgtcctctcgttttgatcaggtgtgtgggactttgggtgactccagtctccactgagcctgtgggaaaaggttccgaaggatcatcctgagcgggctggcaaggc

SEQ ID NO: 133 - DNA, 495 bp, Artificial Sequence
  source: /note="Description of Artificial Sequence: Synthetic polynucleotide"
gcctccctcgcgccatcagcgttacttggatcatcctggattccagcccctttttgcaagttcccagctgtccagccttgacttactcacctacaacagtgagccaacttccctctccaaaatatatggtgtttcgtcgaccgttacttggatcatctcatgctggcacagagatacagggccgagtcgtccagctccaaggcgttcacattcagctcagagctataattagggaactggagacctgagaatctaggagggaagtttcctctgccattctcttcctccctataatactgaaagataaactggggcccctgacccagggcctgttggtaccaggacacagtgttgtgcccagactgagaagagcatctcagagtcacttgctgtcctctcgttttgatcaggtgtgtgggactttgggtgactccagtctccactgagcctgtgggaaaagcgttacttggatcatcctgagcgggctggcaaggc

SEQ ID NO: 134 - DNA, 495 bp, Artificial Sequence
  source: /note="Description of Artificial Sequence: Synthetic polynucleotide"
gcctccctcgcgccatcagtaggagacggatcatcctcctggaactccgaccttatgatacactatcccgaaagaagtcttttacatacccaagacagagagctgggttccactgccaaaaaacagtttttcattgtcgactaggagacggatcatctcatgctggcacagagatacagggccgagtcgtccagctccaaggcgttcacattcagctcagagctataattagggaactggagacctgagaatctaggagggaagtttcctctgccattctcttcctccctataatactgaaagataaactggggcccctgacccagggcctgttggtaccaggacacagtgttgtgcccagactgagaagagcatctcagagtcacttgctgtcctctcgttttgatcaggtgtgtgggactttgggtgactccagtctccactgagcctgtgggaaaagtaggagacggatcatcctgagcgggctggcaaggc

SEQ ID NO: 135 - DNA, 495 bp, Artificial Sequence
  source: /note="Description of Artificial Sequence: Synthetic polynucleotide"
gcctccctcgcgccatcaggacactctggatcatcagagaactctgccttcaagggacaatggccataccaccctgattctgcaacttacctaggatggagagtcgagtcccatcaccaaaatgctggggctgatgtcgacgacactctggatcatctcatgctggcacagagatacagggccgagtcgtccagctccaaggcgttcacattcagctcagagctataattagggaactggagacctgagaatctaggagggaagtttcctctgccattctcttcctccctataatactgaaagataaactggggcccctgacccagggcctgttggtaccaggacacagtgttgtgcccagactgagaagagcatctcagagtcacttgctgtcctctcgttttgatcaggtgtgtgggactttgggtgactccagtctccactgagcctgtgggaaaaggacactctggatcatcctgagcgggctggcaaggc

SEQ ID NO: 136 - DNA, 495 bp, Artificial Sequence
  source: /note="Description of Artificial Sequence: Synthetic polynucleotide"
gcctccctcgcgccatcagttcggaacggatcatcatcattgcagtcaaacccaggcacccccgagtcaagagtggagcccccatacctgtcacagtgagcctggtcccgttcccaaagtggaggggtgaattatgtcgacttcggaacggatcatctcatgctggcacagagatacagggccgagtcgtccagctccaaggcgttcacattcagctcagagctataattagggaactggagacctgagaatctaggagggaagtttcctctgccattctcttcctccctataatactgaaagataaactggggcccctgacccagggcctgttggtaccaggacacagtgttgtgcccagactgagaagagcatctcagagtcacttgctgtcctctcgttttgatcaggtgtgtgggactttgggtgactccagtctccactgagcctgtgggaaaagttcggaacggatcatcctgagcgggctggcaaggc

SEQ ID NO: 137 - DNA, 495 bp, Artificial Sequence
  source: /note="Description of Artificial Sequence: Synthetic polynucleotide"
gcctccctcgcgccatcagaagtaacgggatcatcgggtcgtgcaggctgggctgctcaccctctctcccacctggagcccccttcttacctagcacggtgagccgtgtccctggcccgaagaactgctcattgtgtcgacaagtaacgggatcatctcatgctggcacagagatacagggccgagtcgtccagctccaaggcgttcacattcagctcagagctataattagggaactggagacctgagaatctaggagggaagtttcctctgccattctcttcctccctataatactgaaagataaactggggcccctgacccagggcctgttggtaccaggacacagtgttgtgcccagactgagaagagcatctcagagtcacttgctgtcctctcgttttgatcaggtgtgtgggactttgggtgactccagtctccactgagcctgtgggaaaagaagtaacgggatcatcctgagcgggctggcaaggc

SEQ ID NO: 138 - DNA, 495 bp, Artificial Sequence
  source: /note="Description of Artificial Sequence: Synthetic polynucleotide"
gcctccctcgcgccatcaggtctcctaggatcatccctctgcccatcccgccctctcggagctctccggagccccaaccgcctccttacccagtacggtcagcctagagccttctccaaaaaacagctccccggtgtcgacgtctcctaggatcatctcatgctggcacagagatacagggccgagtcgtccagctccaaggcgttcacattcagctcagagctataattagggaactggagacctgagaatctaggagggaagtttcctctgccattctcttcctccctataatactgaaagataaactggggcccctgacccagggcctgttggtaccaggacacagtgttgtgcccagactgagaagagcatctcagagtcacttgctgtcctctcgttttgatcaggtgtgtgggactttgggtgactccagtctccactgagcctgtgggaaaaggtctcctaggatcatcctgagcgggctggcaaggc

SEQ ID NO: 139 - DNA, 495 bp, Artificial Sequence
  source: /note="Description of Artificial Sequence: Synthetic polynucleotide"
gcctccctcgcgccatcaggtagacacggatcatcgcgtcccggggcgccccctccccagttccggggcttcagcgggagcccccgcttaccgagcactgtcagccgggtgcctgggccaaaatactgcgtatctgtcgacgtagacacggatcatctcatgctggcacagagatacagggccgagtcgtccagctccaaggcgttcacattcagctcagagctataattagggaactggagacctgagaatctaggagggaagtttcctctgccattctcttcctccctataatactgaaagataaactggggcccctgacccagggcctgttggtaccaggacacagtgttgtgcccagactgagaagagcatctcagagtcacttgctgtcctctcgttttgatcaggtgtgtgggactttgggtgactccagtctccactgagcctgtgggaaaaggtagacacggatcatcctgagcgggctggcaaggc

SEQ ID NO: 140 - DNA, 495 bp, Artificial Sequence
  source: /note="Description of Artificial Sequence: Synthetic polynucleotide"
gcctccctcgcgccatcagcactgtacggatcatccgcacaaaaacccgagcgcagtctcgtccccggtcccccggcggccccagcttacccagcactgagagccgggtcccggcgccgaagtactgaatgttttgtcgaccactgtacggatcatctcatgctggcacagagatacagggccgagtcgtccagctccaaggcgttcacattcagctcagagctataattagggaactggagacctgagaatctaggagggaagtttcctctgccattctcttcctccctataatactgaaagataaactggggcccctgacccagggcctgttggtaccaggacacagtgttgtgcccagactgagaagagcatctcagagtcacttgctgtcctctcgttttgatcaggtgtgtgggactttgggtgactccagtctccactgagcctgtgggaaaagcactgtacggatcatcctgagcgggctggcaaggc

SEQ ID NO: 141 - DNA, 495 bp, Artificial Sequence
  source: /note="Description of Artificial Sequence: Synthetic polynucleotide"
gcctccctcgcgccatcaggatgatccggatcatcccccgcaaaaaccagacccaagccgcccgcgcccgcgccccagcagcccgcgctcaccgagcaccaggagccgcgtgcctggcccgaagtactgggtctcgtcgacgatgatccggatcatctcatgctggcacagagatacagggccgagtcgtccagctccaaggcgttcacattcagctcagagctataattagggaactggagacctgagaatctaggagggaagtttcctctgccattctcttcctccctataatactgaaagataaactggggcccctgacccagggcctgttggtaccaggacacagtgttgtgcccagactgagaagagcatctcagagtcacttgctgtcctctcgttttgatcaggtgtgtgggactttgggtgactccagtctccactgagcctgtgggaaaaggatgatccggatcatcctgagcgggctggcaaggc

SEQ ID NO: 142 - DNA, 495 bp, Artificial Sequence
  source: /note="Description of Artificial Sequence: Synthetic polynucleotide"
gcctccctcgcgccatcagcgccaataggatcatcccgccgccttccacctgaatcccgccgcccgggtggtcccgcgaaaactcacccagcacggtcagcctgctgccggccccgaaagtcaggacgttggcccgtcgaccgccaataggatcatctcatgctggcacagagatacagggccgagtcgtccagctccaaggcgttcacattcagctcagagctataattagggaactggagacctgagaatctaggagggaagtttcctctgccattctcttcctccctataatactgaaagataaactggggcccctgacccagggcctgttggtaccaggacacagtgttgtgcccagactgagaagagcatctcagagtcacttgctgtcctctcgttttgatcaggtgtgtgggactttgggtgactccagtctccactgagcctgtgggaaaagcgccaataggatcatcctgagcgggctggcaaggc

SEQ ID NO: 143 - DNA, 495 bp, Artificial Sequence
  source: /note="Description of Artificial Sequence: Synthetic polynucleotide"
gcctccctcgcgccatcagtcaagcctggatcatcccaccctccgactccggggaccgaggggctggaaggtggggagacgcccgaatctcacctgtgaccgtgagcctggtgcccggcccgaagtactgctcgtgtcgactcaagcctggatcatctcatgctggcacagagatacagggccgagtcgtccagctccaaggcgttcacattcagctcagagctataattagggaactggagacctgagaatctaggagggaagtttcctctgccattctcttcctccctataatactgaaagataaactggggcccctgacccagggcctgttggtaccaggacacagtgttgtgcccagactgagaagagcatctcagagtcacttgctgtcctctcgttttgatcaggtgtgtgggactttgggtgactccagtctccactgagcctgtgggaaaagtcaagcctggatcatcctgagcgggctggcaaggc

SEQ ID NO: 144 - DNA, 495 bp, Artificial Sequence
  source: /note="Description of Artificial Sequence: Synthetic polynucleotide"
gcctccctcgcgccatcagagagtgtctattggcgctgtggacccacttttccctgtgacggatctgcaaaagaacctgaaaaatgtcttacctacaactgtgagtctggtgccttgtccaaagaaagcttcagtgtcgacagagtgtctattggcgtcatgctggcacagagatacagggccgagtcccccagcaacaaggcgttcacattcagctcagagctatagttagggaactggcgagctgagaatcgatcagggaagtttcctcttcctctctcttctttctcataatactgaaagataaactggggcccctgacccaggacctgttggtaccaggacacactcttgtgcccagagataggagagcatctcagagtcacttgctgtcctctcgttttgatcaggtgtgtgggactttgggtgactccagcgtccactgggcctgtgggaaaagagagtgtctattggcgctgagcgggctggcaaggc

SEQ ID NO: 145 - DNA, 495 bp, Artificial Sequence
  source: /note="Description of Artificial Sequence: Synthetic polynucleotide"
gcctccctcgcgccatcaggttccgaatattggcgatttcccaggacagagtcctccctcatcgcacccctcctagagacccccagccttacctacaacggttaacctggtccccgaaccgaaggtgtagccatagtcgacgttccgaatattggcgtcatgctggcacagagatacagggccgagtcccccagcaacaaggcgttcacattcagctcagagctatagttagggaactggcgagctgagaatcgatcagggaagtttcctcttcctctctcttctttctcataatactgaaagataaactggggcccctgacccaggacctgttggtaccaggacacactcttgtgcccagagataggagagcatctcagagtcacttgctgtcctctcgttttgatcaggtgtgtgggactttgggtgactccagcgtccactgggcctgtgggaaaaggttccgaatattggcgctgagcgggctggcaaggc

SEQ ID NO: 146 - DNA, 495 bp, Artificial Sequence
  source: /note="Description of Artificial Sequence: Synthetic polynucleotide"
gcctccctcgcgccatcagcgttactttattggcgctggattccagcccctttttgcaagttcccagctgtccagccttgacttactcacctacaacagtgagccaacttccctctccaaaatatatggtgtttcgtcgaccgttactttattggcgtcatgctggcacagagatacagggccgagtcccccagcaacaaggcgttcacattcagctcagagctatagttagggaactggcgagctgagaatcgatcagggaagtttcctcttcctctctcttctttctcataatactgaaagataaactggggcccctgacccaggacctgttggtaccaggacacactcttgtgcccagagataggagagcatctcagagtcacttgctgtcctctcgttttgatcaggtgtgtgggactttgggtgactccagcgtccactgggcctgtgggaaaagcgttactttattggcgctgagcgggctggcaaggc

SEQ ID NO: 147 - DNA, 495 bp, Artificial Sequence
  source: /note="Description of Artificial Sequence: Synthetic polynucleotide"
gcctccctcgcgccatcagtaggagactattggcgctcctggaactccgaccttatgatacactatcccgaaagaagtcttttacatacccaagacagagagctgggttccactgccaaaaaacagtttttcattgtcgactaggagactattggcgtcatgctggcacagagatacagggccgagtcccccagcaacaaggcgttcacattcagctcagagctatagttagggaactggcgagctgagaatcgatcagggaagtttcctcttcctctctcttctttctcataatactgaaagataaactggggcccctgacccaggacctgttggtaccaggacacactcttgtgcccagagataggagagcatctcagagtcacttgctgtcctctcgttttgatcaggtgtgtgggactttgggtgactccagcgtccactgggcctgtgggaaaagtaggagactattggcgctgagcgggctggcaaggc

SEQ ID NO: 148 - DNA, 495 bp, Artificial Sequence
  source: /note="Description of Artificial Sequence: Synthetic polynucleotide"
gcctccctcgcgccatcaggacactcttattggcgagagaactctgccttcaagggacaatggccataccaccctgattctgcaacttacctaggatggagagtcgagtcccatcaccaaaatgctggggctgatgtcgacgacactcttattggcgtcatgctggcacagagatacagggccgagtcccccagcaacaaggcgttcacattcagctcagagctatagttagggaactggcgagctgagaatcgatcagggaagtttcctcttcctctctcttctttctcataatactgaaagataaactggggcccctgacccaggacctgttggtaccaggacacactcttgtgcccagagataggagagcatctcagagtcacttgctgtcctctcgttttgatcaggtgtgtgggactttgggtgactccagcgtccactgggcctgtgggaaaaggacactcttattggcgctgagcgggctggcaaggc

SEQ ID NO: 149 - DNA, 495 bp, Artificial Sequence
  source: /note="Description of Artificial Sequence: Synthetic polynucleotide"
gcctccctcgcgccatcagttcggaactattggcgatcattgcagtcaaacccaggcacccccgagtcaagagtggagcccccatacctgtcacagtgagcctggtcccgttcccaaagtggaggggtgaattatgtcgacttcggaactattggcgtcatgctggcacagagatacagggccgagtcccccagcaacaaggcgttcacattcagctcagagctatagttagggaactggcgagctgagaatcgatcagggaagtttcctcttcctctctcttctttctcataatactgaaagataaactggggcccctgacccaggacctgttggtaccaggacacactcttgtgcccagagataggagagcatctcagagtcacttgctgtcctctcgttttgatcaggtgtgtgggactttgggtgactccagcgtccactgggcctgtgggaaaagttcggaactattggcgctgagcgggctggcaaggc

SEQ ID NO: 150 - DNA, 495 bp, Artificial Sequence
  source: /note="Description of Artificial Sequence: Synthetic polynucleotide"
gcctccctcgcgccatcagaagtaacgtattggcggggtcgtgcaggctgggctgctcaccctctctcccacctggagcccccttcttacctagcacggtgagccgtgtccctggcccgaagaactgctcattgtgtcgacaagtaacgtattggcgtcatgctggcacagagatacagggccgagtcccccagcaacaaggcgttcacattcagctcagagctatagttagggaactggcgagctgagaatcgatcagggaagtttcctcttcctctctcttctttctcataatactgaaagataaactggggcccctgacccaggacctgttggtaccaggacacactcttgtgcccagagataggagagcatctcagagtcacttgctgtcctctcgttttgatcaggtgtgtgggactttgggtgactccagcgtccactgggcctgtgggaaaagaagtaacgtattggcgctgagcgggctggcaaggc

SEQ ID NO: 151 - DNA, 495 bp, Artificial Sequence
  source: /note="Description of Artificial Sequence: Synthetic polynucleotide"
gcctccctcgcgccatcaggtctcctatattggcgcctctgcccatcccgccctctcggagctctccggagccccaaccgcctccttacccagtacggtcagcctagagccttctccaaaaaacagctccccggtgtcgacgtctcctatattggcgtcatgctggcacagagatacagggccgagtcccccagcaacaaggcgttcacattcagctcagagctatagttagggaactggcgagctgagaatcgatcagggaagtttcctcttcctctctcttctttctcataatactgaaagataaactggggcccctgacccaggacctgttggtaccaggacacactcttgtgcccagagataggagagcatctcagagtcacttgctgtcctctcgttttgatcaggtgtgtgggactttgggtgactccagcgtccactgggcctgtgggaaaaggtctcctatattggcgctgagcgggctggcaaggc

SEQ ID NO: 152 - DNA, 495 bp, Artificial Sequence
  source: /note="Description of Artificial Sequence: Synthetic polynucleotide"
gcctccctcgcgccatcaggtagacactattggcggcgtcccggggcgccccctccccagttccggggcttcagcgggagcccccgcttaccgagcactgtcagccgggtgcctgggccaaaatactgcgtatctgtcgacgtagacactattggcgtcatgctggcacagagatacagggccgagtcccccagcaacaaggcgttcacattcagctcagagctatagttagggaactggcgagctgagaatcgatcagggaagtttcctcttcctctctcttctttctcataatactgaaagataaactggggcccctgacccaggacctgttggtaccaggacacactcttgtgcccagagataggagagcatctcagagtcacttgctgtcctctcgttttgatcaggtgtgtgggactttgggtgactccagcgtccactgggcctgtgggaaaaggtagacactattggcgctgagcgggctggcaaggc

SEQ ID NO: 153 - DNA, 495 bp, Artificial Sequence
  source: /note="Description of Artificial Sequence: Synthetic polynucleotide"
gcctccctcgcgccatcagcactgtactattggcgcgcacaaaaacccgagcgcagtctcgtccccggtcccccggcggccccagcttacccagcactgagagccgggtcccggcgccgaagtactgaatgttttgtcgaccactgtactattggcgtcatgctggcacagagatacagggccgagtcccccagcaacaaggcgttcacattcagctcagagctatagttagggaactggcgagctgagaatcgatcagggaagtttcctcttcctctctcttctttctcataatactgaaagataaactggggcccctgacccaggacctgttggtaccaggacacactcttgtgcccagagataggagagcatctcagagtcacttgctgtcctctcgttttgatcaggtgtgtgggactttgggtgactccagcgtccactgggcctgtgggaaaagcactgtactattggcgctgagcgggctggcaaggc

SEQ ID NO: 154 - DNA, 495 bp, Artificial Sequence
  source: /note="Description of Artificial Sequence: Synthetic polynucleotide"
gcctccctcgcgccatcaggatgatcctattggcgccccgcaaaaaccagacccaagccgcccgcgcccgcgccccagcagcccgcgctcaccgagcaccaggagccgcgtgcctggcccgaagtactgggtctcgtcgacgatgatcctattggcgtcatgctggcacagagatacagggccgagtcccccagcaacaaggcgttcacattcagctcagagctatagttagggaactggcgagctgagaatcgatcagggaagtttcctcttcctctctcttctttctcataatactgaaagataaactggggcccctgacccaggacctgttggtaccaggacacactcttgtgcccagagataggagagcatctcagagtcacttgctgtcctctcgttttgatcaggtgtgtgggactttgggtgactccagcgtccactgggcctgtgggaaaaggatgatcctattggcgctgagcgggctggcaaggc

SEQ ID NO: 155 - DNA, 495 bp, Artificial Sequence
  source: /note="Description of Artificial Sequence: Synthetic polynucleotide"
gcctccctcgcgccatcagcgccaatatattggcgccgccgccttccacctgaatcccgccgcccgggtggtcccgcgaaaactcacccagcacggtcagcctgctgccggccccgaaagtcaggacgttggcccgtcgaccgccaatatattggcgtcatgctggcacagagatacagggccgagtcccccagcaacaaggcgttcacattcagctcagagctatagttagggaactggcgagctgagaatcgatcagggaagtttcctcttcctctctcttctttctcataatactgaaagataaactggggcccctgacccaggacctgttggtaccaggacacactcttgtgcccagagataggagagcatctcagagtcacttgctgtcctctcgttttgatcaggtgtgtgggactttgggtgactccagcgtccactgggcctgtgggaaaagcgccaatatattggcgctgagcgggctggcaaggc

SEQ ID NO: 156 - DNA, 495 bp, Artificial Sequence
  source: /note="Description of Artificial Sequence: Synthetic polynucleotide"
gcctccctcgcgccatcagtcaagccttattggcgccaccctccgactccggggaccgaggggctggaaggtggggagacgcccgaatctcacctgtgaccgtgagcctggtgcccggcccgaagtactgctcgtgtcgactcaagccttattggcgtcatgctggcacagagatacagggccgagtcccccagcaacaaggcgttcacattcagctcagagctatagttagggaactggcgagctgagaatcgatcagggaagtttcctcttcctctctcttctttctcataatactgaaagataaactggggcccctgacccaggacctgttggtaccaggacacactcttgtgcccagagataggagagcatctcagagtcacttgctgtcctctcgttttgatcaggtgtgtgggactttgggtgactccagcgtccactgggcctgtgggaaaagtcaagccttattggcgctgagcgggctggcaaggc

SEQ ID NO: 157 - DNA, 495 bp, Artificial Sequence
  source: /note="Description of Artificial Sequence: Synthetic polynucleotide"
gcctccctcgcgccatcagagagtgtcaggcttgactgtggacccacttttccctgtgacggatctgcaaaagaacctgaaaaatgtcttacctacaactgtgagtctggtgccttgtccaaagaaagcttcagtgtcgacagagtgtcaggcttgatcatgctggcacagagatagagggccgagtcccccagcaacaaggcgttcacattcagctcagagctatagttagggaactggtgacctgagaatcgatcagggaagttgcctctctgtctctcttcctcctcataatactgaaagataaactggggcccctgacccagggcctgttggtaccaggacacagtgtcatgcccagacttaggagagcatctcagagtcacttgctgtcctctcgttttgatcaggtgtgtgggactttgggtgactccagcgtccactaagcctgtgggaaaagagagtgtcaggcttgactgagcgggctggcaaggc

SEQ ID NO: 158 - DNA, 495 bp, Artificial Sequence
  source: /note="Description of Artificial Sequence: Synthetic polynucleotide"
gcctccctcgcgccatcaggttccgaaaggcttgaatttcccaggacagagtcctccctcatcgcacccctcctagagacccccagccttacctacaacggttaacctggtccccgaaccgaaggtgtagccatagtcgacgttccgaaaggcttgatcatgctggcacagagatagagggccgagtcccccagcaacaaggcgttcacattcagctcagagctatagttagggaactggtgacctgagaatcgatcagggaagttgcctctctgtctctcttcctcctcataatactgaaagataaactggggcccctgacccagggcctgttggtaccaggacacagtgtcatgcccagacttaggagagcatctcagagtcacttgctgtcctctcgttttgatcaggtgtgtgggactttgggtgactccagcgtccactaagcctgtgggaaaaggttccgaaaggcttgactgagcgggctggcaaggc

SEQ ID NO: 159 - DNA, 495 bp, Artificial Sequence
  source: /note="Description of Artificial Sequence: Synthetic polynucleotide"
gcctccctcgcgccatcagcgttacttaggcttgactggattccagcccctttttgcaagttcccagctgtccagccttgacttactcacctacaacagtgagccaacttccctctccaaaatatatggtgtttcgtcgaccgttacttaggcttgatcatgctggcacagagatagagggccgagtcccccagcaacaaggcgttcacattcagctcagagctatagttagggaactggtgacctgagaatcgatcagggaagttgcctctctgtctctcttcctcctcataatactgaaagataaactggggcccctgacccagggcctgttggtaccaggacacagtgtcatgcccagacttaggagagcatctcagagtcacttgctgtcctctcgttttgatcaggtgtgtgggactttgggtgactccagcgtccactaagcctgtgggaaaagcgttacttaggcttgactgagcgggctggcaaggc

SEQ ID NO: 160 - DNA, 495 bp, Artificial Sequence
  source: /note="Description of Artificial Sequence: Synthetic polynucleotide"
gcctccctcgcgccatcagtaggagacaggcttgactcctggaactccgaccttatgatacactatcccgaaagaagtcttttacatacccaagacagagagctgggttccactgccaaaaaacagtttttcattgtcgactaggagacaggcttgatcatgctggcacagagatagagggccgagtcccccagcaacaaggcgttcacattcagctcagagctatagttagggaactggtgacctgagaatcgatcagggaagttgcctctctgtctctcttcctcctcataatactgaaagataaactggggcccctgacccagggcctgttggtaccaggacacagtgtcatgcccagacttaggagagcatctcagagtcacttgctgtcctctcgttttgatcaggtgtgtgggactttgggtgactccagcgtccactaagcctgtgggaaaagtaggagacaggcttgactgagcgggctggcaaggc

SEQ ID NO: 161 - DNA, 495 bp, Artificial Sequence
  source: /note="Description of Artificial Sequence: Synthetic polynucleotide"
gcctccctcgcgccatcaggacactctaggcttgaagagaactctgccttcaagggacaatggccataccaccctgattctgcaacttacctaggatggagagtcgagtcccatcaccaaaatgctggggctgatgtcgacgacactctaggcttgatcatgctggcacagagatagagggccgagtcccccagcaacaaggcgttcacattcagctcagagctatagttagggaactggtgacctgagaatcgatcagggaagttgcctctctgtctctcttcctcctcataatactgaaagataaactggggcccctgacccagggcctgttggtaccaggacacagtgtcatgcccagacttaggagagcatctcagagtcacttgctgtcctctcgttttgatcaggtgtgtgggactttgggtgactccagcgtccactaagcctgtgggaaaaggacactctaggcttgactgagcgggctggcaaggc

SEQ ID NO: 162 - DNA, 495 bp, Artificial Sequence
  source: /note="Description of Artificial Sequence: Synthetic polynucleotide"
gcctccctcgcgccatcagttcggaacaggcttgaatcattgcagtcaaacccaggcacccccgagtcaagagtggagcccccatacctgtcacagtgagcctggtcccgttcccaaagtggaggggtgaattatgtcgacttcggaacaggcttgatcatgctggcacagagatagagggccgagtcccccagcaacaaggcgttcacattcagctcagagctatagttagggaactggtgacctgagaatcgatcagggaagttgcctctctgtctctcttcctcctcataatactgaaagataaactggggcccctgacccagggcctgttggtaccaggacacagtgtcatgcccagacttaggagagcatctcagagtcacttgctgtcctctcgttttgatcaggtgtgtgggactttgggtgactccagcgtccactaagcctgtgggaaaagttcggaacaggcttgactgagcgggctggcaaggc

SEQ ID NO: 163 - DNA, 495 bp, Artificial Sequence
  source: /note="Description of Artificial Sequence: Synthetic polynucleotide"
gcctccctcgcgccatcagaagtaacgaggcttgagggtcgtgcaggctgggctgctcaccctctctcccacctggagcccccttcttacctagcacggtgagccgtgtccctggcccgaagaactgctcattgtgtcgacaagtaacgaggcttgatcatgctggcacagagatagagggccgagtcccccagcaacaaggcgttcacattcagctcagagctatagttagggaactggtgacctgagaatcgatcagggaagttgcctctctgtctctcttcctcctcataatactgaaagataaactggggcccctgacccagggcctgttggtaccaggacacagtgtcatgcccagacttaggagagcatctcagagtcacttgctgtcctctcgttttgatcaggtgtgtgggactttgggtgactccagcgtccactaagcctgtgggaaaagaagtaacgaggcttgactgagcgggctggcaaggc

SEQ ID NO: 164 - DNA, 495 bp, Artificial Sequence
  source: /note="Description of Artificial Sequence: Synthetic polynucleotide"
gcctccctcgcgccatcaggtctcctaaggcttgacctctgcccatcccgccctctcggagctctccggagccccaaccgcctccttacccagtacggtcagcctagagccttctccaaaaaacagctccccggtgtcgacgtctcctaaggcttgatcatgctggcacagagatagagggccgagtcccccagcaacaaggcgttcacattcagctcagagctatagttagggaactggtgacctgagaatcgatcagggaagttgcctctctgtctctcttcctcctcataatactgaaagataaactggggcccctgacccagggcctgttggtaccaggacacagtgtcatgcccagacttaggagagcatctcagagtcacttgctgtcctctcgttttgatcaggtgtgtgggactttgggtgactccagcgtccactaagcctgtgggaaaaggtctcctaaggcttgactgagcgggctggcaaggc

SEQ ID NO: 165 - DNA, 495 bp, Artificial Sequence
  source: /note="Description of Artificial Sequence: Synthetic polynucleotide"
gcctccctcgcgccatcaggtagacacaggcttgagcgtcccggggcgccccctccccagttccggggcttcagcgggagcccccgcttaccgagcactgtcagccgggtgcctgggccaaaatactgcgtatctgtcgacgtagacacaggcttgatcatgctggcacagagatagagggccgagtcccccagcaacaaggcgttcacattcagctcagagctatagttagggaactggtgacctgagaatcgatcagggaagttgcctctctgtctctcttcctcctcataatactgaaagataaactggggcccctgacccagggcctgttggtaccaggacacagtgtcatgcccagacttaggagagcatctcagagtcacttgctgtcctctcgttttgatcaggtgtgtgggactttgggtgactccagcgtccactaagcctgtgggaaaaggtagacacaggcttgactgagcgggctggcaaggc

SEQ ID NO: 166 - DNA, 495 bp, Artificial Sequence
  source: /note="Description of Artificial Sequence: Synthetic polynucleotide"
gcctccctcgcgccatcagcactgtacaggcttgacgcacaaaaacccgagcgcagtctcgtccccggtcccccggcggccccagcttacccagcactgagagccgggtcccggcgccgaagtactgaatgttttgtcgaccactgtacaggcttgatcatgctggcacagagatagagggccgagtcccccagcaacaaggcgttcacattcagctcagagctatagttagggaactggtgacctgagaatcgatcagggaagttgcctctctgtctctcttcctcctcataatactgaaagataaactggggcccctgacccagggcctgttggtaccaggacacagtgtcatgcccagacttaggagagcatctcagagtcacttgctgtcctctcgttttgatcaggtgtgtgggactttgggtgactccagcgtccactaagcctgtgggaaaagcactgtacaggcttgactgagcgggctggcaaggc

SEQ ID NO: 167 - DNA, 495 bp, Artificial Sequence
  source: /note="Description of Artificial Sequence: Synthetic polynucleotide"
gcctccctcgcgccatcaggatgatccaggcttgaccccgcaaaaaccagacccaagccgcccgcgcccgcgccccagcagcccgcgctcaccgagcaccaggagccgcgtgcctggcccgaagtactgggtctcgtcgacgatgatccaggcttgatcatgctggcacagagatagagggccgagtcccccagcaacaaggcgttcacattcagctcagagctatagttagggaactggtgacctgagaatcgatcagggaagttgcctctctgtctctcttcctcctcataatactgaaagataaactggggcccctgacccagggcctgttggtaccaggacacagtgtcatgcccagacttaggagagcatctcagagtcacttgctgtcctctcgttttgatcaggtgtgtgggactttgggtgactccagcgtccactaagcctgtgggaaaaggatgatccaggcttgactgagcgggctggcaaggc

SEQ ID NO: 168 - DNA, 495 bp, Artificial Sequence
  source: /note="Description of Artificial Sequence: Synthetic polynucleotide"
gcctccctcgcgccatcagcgccaataaggcttgaccgccgccttccacctgaatcccgccgcccgggtggtcccgcgaaaactcacccagcacggtcagcctgctgccggccccgaaagtcaggacgttggcccgtcgaccgccaataaggcttgatcatgctggcacagagatagagggccgagtcccccagcaacaaggcgttcacattcagctcagagctatagttagggaactggtgacctgagaatcgatcagggaagttgcctctctgtctctcttcctcctcataatactgaaagataaactggggcccctgacccagggcctgttggtaccaggacacagtgtcatgcccagacttaggagagcatctcagagtcacttgctgtcctctcgttttgatcaggtgtgtgggactttgggtgactccagcgtccactaagcctgtgggaaaagcgccaataaggcttgactgagcgggctggcaaggc

SEQ ID NO: 169 - DNA, 495 bp, Artificial Sequence
  source: /note="Description of Artificial Sequence: Synthetic polynucleotide"
gcctccctcgcgccatcagtcaagcctaggcttgaccaccctccgactccggggaccgaggggctggaaggtggggagacgcccgaatctcacctgtgaccgtgagcctggtgcccggcccgaagtactgctcgtgtcgactcaagcctaggcttgatcatgctggcacagagatagagggccgagtcccccagcaacaaggcgttcacattcagctcagagctatagttagggaactggtgacctgagaatcgatcagggaagttgcctctctgtctctcttcctcctcataatactgaaagataaactggggcccctgacccagggcctgttggtaccaggacacagtgtcatgcccagacttaggagagcatctcagagtcacttgctgtcctctcgttttgatcaggtgtgtgggactttgggtgactccagcgtccactaagcctgtgggaaaagtcaagcctaggcttgactgagcgggctggcaaggc

SEQ ID NO: 170 - DNA, 495 bp, Artificial Sequence
  source: /note="Description of Artificial Sequence: Synthetic polynucleotide"
gcctccctcgcgccatcagagagtgtcacacacgtctgtggacccacttttccctgtgacggatctgcaaaagaacctgaaaaatgtcttacctacaactgtgagtctggtgccttgtccaaagaaagcttcagtgtcgacagagtgtcacacacgttcatgctggcacagagatagagggccgagtcccctagcaacaaggcgttcacattcagctcagagctatagttagggaactggtgacctgagaattgatcagggaagtttcctcttcctctctcttctttctcataatactgaaagataaactggggcccctgacccagggcctgttggtacgaggacacactggtgtgcccagagataggagagcatctcagagtcacgtgctgtcctctcgttttgatcaggtgtgtgggactttgggtgactccagcgtccactgggcctgtgggaaaagagagtgtcacacacgtctgagcgggctggcaaggc

SEQ ID NO: 171 - DNA, 495 bp, Artificial Sequence
  source: /note="Description of Artificial Sequence: Synthetic polynucleotide"
gcctccctcgcgccatcaggttccgaaacacacgtatttcccaggacagagtcctccctcatcgcacccctcctagagacccccagccttacctacaacggttaacctggtccccgaaccgaaggtgtagccatagtcgacgttccgaaacacacgttcatgctggcacagagatagagggccgagtcccctagcaacaaggcgttcacattcagctcagagctatagttagggaactggtgacctgagaattgatcagggaagtttcctcttcctctctcttctttctcataatactgaaagataaactggggcccctgacccagggcctgttggtacgaggacacactggtgtgcccagagataggagagcatctcagagtcacgtgctgtcctctcgttttgatcaggtgtgtgggactttgggtgactccagcgtccactgggcctgtgggaaaaggttccgaaacacacgtctgagcgggctggcaaggc

SEQ ID NO: 172 - DNA, 495 bp, Artificial Sequence
  source: /note="Description of Artificial Sequence: Synthetic polynucleotide"
gcctccctcgcgccatcagcgttacttacacacgtctggattccagcccctttttgcaagttcccagctgtccagccttgacttactcacctacaacagtgagccaacttccctctccaaaatatatggtgtttcgtcgaccgttacttacacacgttcatgctggcacagagatagagggccgagtcccctagcaacaaggcgttcacattcagctcagagctatagttagggaactggtgacctgagaattgatcagggaagtttcctcttcctctctcttctttctcataatactgaaagataaactggggcccctgacccagggcctgttggtacgaggacacactggtgtgcccagagataggagagcatctcagagtcacgtgctgtcctctcgttttgatcaggtgtgtgggactttgggtgactccagcgtccactgggcctgtgggaaaagcgttacttacacacgtctgagcgggctggcaaggc

SEQ ID NO: 173 - DNA, 495 bp, Artificial Sequence
  source: /note="Description of Artificial Sequence: Synthetic polynucleotide"
gcctccctcgcgccatcagtaggagacacacacgtctcctggaactccgaccttatgatacactatcccgaaagaagtcttttacatacccaagacagagagctgggttccactgccaaaaaacagtttttcattgtcgactaggagacacacacgttcatgctggcacagagatagagggccgagtcccctagcaacaaggcgttcacattcagctcagagctatagttagggaactggtgacctgagaattgatcagggaagtttcctcttcctctctcttctttctcataatactgaaagataaactggggcccctgacccagggcctgttggtacgaggacacactggtgtgcccagagataggagagcatctcagagtcacgtgctgtcctctcgttttgatcaggtgtgtgggactttgggtgactccagcgtccactgggcctgtgggaaaagtaggagacacacacgtctgagcgggctggcaaggc

SEQ ID NO: 174 - DNA, 495 bp, Artificial Sequence
  source: /note="Description of Artificial Sequence: Synthetic polynucleotide"
gcctccctcgcgccatcaggacactctacacacgtagagaactctgccttcaagggacaatggccataccaccctgattctgcaacttacctaggatggagagtcgagtcccatcaccaaaatgctggggctgatgtcgacgacactctacacacgttcatgctggcacagagatagagggccgagtcccctagcaacaaggcgttcacattcagctcagagctatagttagggaactggtgacctgagaattgatcagggaagtttcctcttcctctctcttctttctcataatactgaaagataaactggggcccctgacccagggcctgttggtacgaggacacactggtgtgcccagagataggagagcatctcagagtcacgtgctgtcctctcgttttgatcaggtgtgtgggactttgggtgactccagcgtccactgggcctgtgggaaaaggacactctacacacgtctgagcgggctggcaaggc

SEQ ID NO: 175 - DNA, 495 bp, Artificial Sequence
  source: /note="Description of Artificial Sequence: Synthetic polynucleotide"
gcctccctcgcgccatcagttcggaacacacacgtatcattgcagtcaaacccaggcacccccgagtcaagagtggagcccccatacctgtcacagtgagcctggtcccgttcccaaagtggaggggtgaattatgtcgacttcggaacacacacgttcatgctggcacagagatagagggccgagtcccctagcaacaaggcgttcacattcagctcagagctatagttagggaactggtgacctgagaattgatcagggaagtttcctcttcctctctcttctttctcataatactgaaagataaactggggcccctgacccagggcctgttggtacgaggacacactggtgtgcccagagataggagagcatctcagagtcacgtgctgtcctctcgttttgatcaggtgtgtgggactttgggtgactccagcgtccactgggcctgtgggaaaagttcggaacacacacgtctgagcgggctggcaaggc

SEQ ID NO: 176 - DNA, 495 bp, Artificial Sequence
  source: /note="Description of Artificial Sequence: Synthetic polynucleotide"
gcctccctcgcgccatcagaagtaacgacacacgtgggtcgtgcaggctgggctgctcaccctctctcccacctggagcccccttcttacctagcacggtgagccgtgtccctggcccgaagaactgctcattgtgtcgacaagtaacgacacacgttcatgctggcacagagatagagggccgagtcccctagcaacaaggcgttcacattcagctcagagctatagttagggaactggtgacctgagaattgatcagggaagtttcctcttcctctctcttctttctcataatactgaaagataaactggggcccctgacccagggcctgttggtacgaggacacactggtgtgcccagagataggagagcatctcagagtcacgtgctgtcctctcgttttgatcaggtgtgtgggactttgggtgactccagcgtccactgggcctgtgggaaaagaagtaacgacacacgtctgagcgggctggcaaggc

SEQ ID NO: 177 - DNA, 495 bp, Artificial Sequence
  source: /note="Description of Artificial Sequence: Synthetic polynucleotide"
gcctccctcgcgccatcaggtctcctaacacacgtcctctgcccatcccgccctctcggagctctccggagccccaaccgcctccttacccagtacggtcagcctagagccttctccaaaaaacagctccccggtgtcgacgtctcctaacacacgttcatgctggcacagagatagagggccgagtcccctagcaacaaggcgttcacattcagctcagagctatagttagggaactggtgacctgagaattgatcagggaagtttcctcttcctctctcttctttctcataatactgaaagataaactggggcccctgacccagggcctgttggtacgaggacacactggtgtgcccagagataggagagcatctcagagtcacgtgctgtcctctcgttttgatcaggtgtgtgggactttgggtgactccagcgtccactgggcctgtgggaaaaggtctcctaacacacgtctgagcgggctggcaaggc

SEQ ID NO: 178 - DNA, 495 bp, Artificial Sequence
  source: /note="Description of Artificial Sequence: Synthetic polynucleotide"
gcctccctcgcgccatcaggtagacacacacacgtgcgtcccggggcgccccctccccagttccggggcttcagcgggagcccccgcttaccgagcactgtcagccgggtgcctgggccaaaatactgcgtatctgtcgacgtagacacacacacgttcatgctggcacagagatagagggccgagtcccctagcaacaaggcgttcacattcagctcagagctatagttagggaactggtgacctgagaattgatcagggaagtttcctcttcctctctcttctttctcataatactgaaagataaactggggcccctgacccagggcctgttggtacgaggacacactggtgtgcccagagataggagagcatctcagagtcacgtgctgtcctctcgttttgatcaggtgtgtgggactttgggtgactccagcgtccactgggcctgtgggaaaaggtagacacacacacgtctgagcgggctggcaaggc

SEQ ID NO: 179 - DNA, 495 bp, Artificial Sequence
  source: /note="Description of Artificial Sequence: Synthetic polynucleotide"
gcctccctcgcgccatcagcactgtacacacacgtcgcacaaaaacccgagcgcagtctcgtccccggtcccccggcggccccagcttacccagcactgagagccgggtcccggcgccgaagtactgaatgttttgtcgaccactgtacacacacgttcatgctggcacagagatagagggccgagtcccctagcaacaaggcgttcacattcagctcagagctatagttagggaactggtgacctgagaattgatcagggaagtttcctcttcctctctcttctttctcataatactgaaagataaactggggcccctgacccagggcctgttggtacgaggacacactggtgtgcccagagataggagagcatctcagagtcacgtgctgtcctctcgttttgatcaggtgtgtgggactttgggtgactccagcgtccactgggcctgtgggaaaagcactgtacacacacgtctgagcgggctggcaaggc

SEQ ID NO: 180 - DNA, 495 bp, Artificial Sequence
  source: /note="Description of Artificial Sequence: Synthetic polynucleotide"
gcctccctcgcgccatcaggatgatccacacacgtccccgcaaaaaccagacccaagccgcccgcgcccgcgccccagcagcccgcgctcaccgagcaccaggagccgcgtgcctggcccgaagtactgggtctcgtcgacgatgatccacacacgttcatgctggcacagagatagagggccgagtcccctagcaacaaggcgttcacattcagctcagagctatagttagggaactggtgacctgagaattgatcagggaagtttcctcttcctctctcttctttctcataatactgaaagataaactggggcccctgacccagggcctgttggtacgaggacacactggtgtgcccagagataggagagcatctcagagtcacgtgctgtcctctcgttttgatcaggtgtgtgggactttgggtgactccagcgtccactgggcctgtgggaaaaggatgatccacacacgtctgagcgggctggcaaggc

SEQ ID NO: 181 - DNA, 495 bp, Artificial Sequence
  source: /note="Description of Artificial Sequence: Synthetic polynucleotide"
gcctccctcgcgccatcagcgccaataacacacgtccgccgccttccacctgaatcccgccgcccgggtggtcccgcgaaaactcacccagcacggtcagcctgctgccggccccgaaagtcaggacgttggcccgtcgaccgccaataacacacgttcatgctggcacagagatagagggccgagtcccctagcaacaaggcgttcacattcagctcagagctatagttagggaactggtgacctgagaattgatcagggaagtttcctcttcctctctcttctttctcataatactgaaagataaactggggcccctgacccagggcctgttggtacgaggacacactggtgtgcccagagataggagagcatctcagagtcacgtgctgtcctctcgttttgatcaggtgtgtgggactttgggtgactccagcgtccactgggcctgtgggaaaagcgccaataacacacgtctgagcgggctggcaaggc

SEQ ID NO: 182 - DNA, 495 bp, Artificial Sequence
  source: /note="Description of Artificial Sequence: Synthetic polynucleotide"
gcctccctcgcgccatcagtcaagcctacacacgtccaccctccgactccggggaccgaggggctggaaggtggggagacgcccgaatctcacctgtgaccgtgagcctggtgcccggcccgaagtactgctcgtgtcgactcaagcctacacacgttcatgctggcacagagatagagggccgagtcccctagcaacaaggcgttcacattcagctcagagctatagttagggaactggtgacctgagaattgatcagggaagtttcctcttcctctctcttctttctcataatactgaaagataaactggggcccctgacccagggcctgttggtacgaggacacactggtgtgcccagagataggagagcatctcagagtcacgtgctgtcctctcgttttgatcaggtgtgtgggactttgggtgactccagcgtccactgggcctgtgggaaaagtcaagcctacacacgtctgagcgggctggcaaggc

SEQ ID NO: 183 - DNA, 495 bp, Artificial Sequence
  source: /note="Description of Artificial Sequence: Synthetic polynucleotide"
gcctccctcgcgccatcagagagtgtctagacggactgtggacccacttttccctgtgacggatctgcaaaagaacctgaaaaatgtcttacctacaactgtgagtctggtgccttgtccaaagaaagcttcagtgtcgacagagtgtctagacggatcatgctggcacagagatacagggccgagtcctccagctccaaggcgttcacattcagctcagagctataattagggaactggcgacctgaaaatctaggagggaagtttcctctgtttctctcttcaccctcgtcataccaaaggaggaactggaggcccagacccagggcctgttggtaccagtacacactggtgtgcccagagataggagagcatctcagagtcgcttgctgtcctctcgttttgatcaggtgtgtgggactttgtgtgactccagcctccactgggcctgcaggaaaagagagtgtctagacggactgagcgggctggcaaggc

SEQ ID NO: 184 - DNA, 495 bp, Artificial Sequence
  source: /note="Description of Artificial Sequence: Synthetic polynucleotide"
gcctccctcgcgccatcaggttccgaatagacggaatttcccaggacagagtcctccctcatcgcacccctcctagagacccccagccttacctacaacggttaacctggtccccgaaccgaaggtgtagccatagtcgacgttccgaatagacggatcatgctggcacagagatacagggccgagtcctccagctccaaggcgttcacattcagctcagagctataattagggaactggcgacctgaaaatctaggagggaagtttcctctgtttctctcttcaccctcgtcataccaaaggaggaactggaggcccagacccagggcctgttggtaccagtacacactggtgtgcccagagataggagagcatctcagagtcgcttgctgtcctctcgttttgatcaggtgtgtgggactttgtgtgactccagcctccactgggcctgcaggaaaaggttccgaatagacggactgagcgggctggcaaggc

SEQ ID NO: 185 - DNA, 495 bp, Artificial Sequence
  source: /note="Description of Artificial Sequence: Synthetic polynucleotide"
gcctccctcgcgccatcagcgttactttagacggactggattccagcccctttttgcaagttcccagctgtccagccttgacttactcacctacaacagtgagccaacttccctctccaaaatatatggtgtttcgtcgaccgttactttagacggatcatgctggcacagagatacagggccgagtcctccagctccaaggcgttcacattcagctcagagctataattagggaactggcgacctgaaaatctaggagggaagtttcctctgtttctctcttcaccctcgtcataccaaaggaggaactggaggcccagacccagggcctgttggtaccagtacacactggtgtgcccagagataggagagcatctcagagtcgcttgctgtcctctcgttttgatcaggtgtgtgggactttgtgtgactccagcctccactgggcctgcaggaaaagcgttactttagacggactgagcgggctggcaaggc

SEQ ID NO: 186 - DNA, 495 bp, Artificial Sequence
  source: /note="Description of Artificial Sequence: Synthetic polynucleotide"
gcctccctcgcgccatcagtaggagactagacggactcctggaactccgaccttatgatacactatcccgaaagaagtcttttacatacccaagacagagagctgggttccactgccaaaaaacagtttttcattgtcgactaggagactagacggatcatgctggcacagagatacagggccgagtcctccagctccaaggcgttcacattcagctcagagctataattagggaactggcgacctgaaaatctaggagggaagtttcctctgtttctctcttcaccctcgtcataccaaaggaggaactggaggcccagacccagggcctgttggtaccagtacacactggtgtgcccagagataggagagcatctcagagtcgcttgctgtcctctcgttttgatcaggtgtgtgggactttgtgtgactccagcctccactgggcctgcaggaaaagtaggagactagacggactgagcgggctggcaaggc

SEQ ID NO: 187 - DNA, 495 bp, Artificial Sequence
  source: /note="Description of Artificial Sequence: Synthetic polynucleotide"
gcctccctcgcgccatcaggacactcttagacggaagagaactctgccttcaagggacaatggccataccaccctgattctgcaacttacctaggatggagagtcgagtcccatcaccaaaatgctggggctgatgtcgacgacactcttagacggatcatgctggcacagagatacagggccgagtcctccagctccaaggcgttcacattcagctcagagctataattagggaactggcgacctgaaaatctaggagggaagtttcctctgtttctctcttcaccctcgtcataccaaaggaggaactggaggcccagacccagggcctgttggtaccagtacacactggtgtgcccagagataggagagcatctcagagtcgcttgctgtcctctcgttttgatcaggtgtgtgggactttgtgtgactccagcctccactgggcctgcaggaaaaggacactcttagacggactgagcgggctggcaaggc

SEQ ID NO: 188 - DNA, 495 bp, Artificial Sequence
  source: /note="Description of Artificial Sequence: Synthetic polynucleotide"
gcctccctcgcgccatcagttcggaactagacggaatcattgcagtcaaacccaggcacccccgagtcaagagtggagcccccatacctgtcacagtgagcctggtcccgttcccaaagtggaggggtgaattatgtcgacttcggaactagacggatcatgctggcacagagatacagggccgagtcctccagctccaaggcgttcacattcagctcagagctataattagggaactggcgacctgaaaatctaggagggaagtttcctctgtttctctcttcaccctcgtcataccaaaggaggaactggaggcccagacccagggcctgttggtaccagtacacactggtgtgcccagagataggagagcatctcagagtcgcttgctgtcctctcgttttgatcaggtgtgtgggactttgtgtgactccagcctccactgggcctgcaggaaaagttcggaactagacggactgagcgggctggcaaggc

SEQ ID NO: 189 - DNA, 495 bp, Artificial Sequence
  source: /note="Description of Artificial Sequence: Synthetic polynucleotide"
gcctccctcgcgccatcagaagtaacgtagacggagggtcgtgcaggctgggctgctcaccctctctcccacctggagcccccttcttacctagcacggtgagccgtgtccctggcccgaagaactgctcattgtgtcgacaagtaacgtagacggatcatgctggcacagagatacagggccgagtcctccagctccaaggcgttcacattcagctcagagctataattagggaactggcgacctgaaaatctaggagggaagtttcctctgtttctctcttcaccctcgtcataccaaaggaggaactggaggcccagacccagggcctgttggtaccagtacacactggtgtgcccagagataggagagcatctcagagtcgcttgctgtcctctcgttttgatcaggtgtgtgggactttgtgtgactccagcctccactgggcctgcaggaaaagaagtaacgtagacggactgagcgggctggcaaggc

SEQ ID NO: 190 - DNA, 495 bp, Artificial Sequence
  source: /note="Description of Artificial Sequence: Synthetic polynucleotide"
gcctccctcgcgccatcaggtctcctatagacggacctctgcccatcccgccctctcggagctctccggagccccaaccgcctccttacccagtacggtcagcctagagccttctccaaaaaacagctccccggtgtcgacgtctcctatagacggatcatgctggcacagagatacagggccgagtcctccagctccaaggcgttcacattcagctcagagctataattagggaactggcgacctgaaaatctaggagggaagtttcctctgtttctctcttcaccctcgtcataccaaaggaggaactggaggcccagacccagggcctgttggtaccagtacacactggtgtgcccagagataggagagcatctcagagtcgcttgctgtcctctcgttttgatcaggtgtgtgggactttgtgtgactccagcctccactgggcctgcaggaaaaggtctcctatagacggactgagcgggctggcaaggc

SEQ ID NO: 191 - DNA, 495 bp, Artificial Sequence
  source: /note="Description of Artificial Sequence: Synthetic polynucleotide"
gcctccctcgcgccatcaggtagacactagacggagcgtcccggggcgccccctccccagttccggggcttcagcgggagcccccgcttaccgagcactgtcagccgggtgcctgggccaaaatactgcgtatctgtcgacgtagacactagacggatcatgctggcacagagatacagggccgagtcctccagctccaaggcgttcacattcagctcagagctataattagggaactggcgacctgaaaatctaggagggaagtttcctctgtttctctcttcaccctcgtcataccaaaggaggaactggaggcccagacccagggcctgttggtaccagtacacactggtgtgcccagagataggagagcatctcagagtcgcttgctgtcctctcgttttgatcaggtgtgtgggactttgtgtgactccagcctccactgggcctgcaggaaaaggtagacactagacggactgagcgggctggcaaggc

SEQ ID NO: 192 - DNA, 495 bp, Artificial Sequence
  source: /note="Description of Artificial Sequence: Synthetic polynucleotide"
gcctccctcgcgccatcagcactgtactagacggacgcacaaaaacccgagcgcagtctcgtccccggtcccccggcggccccagcttacccagcactgagagccgggtcccggcgccgaagtactgaatgttttgtcgaccactgtactagacggatcatgctggcacagagatacagggccgagtcctccagctccaaggcgttcacattcagctcagagctataattagggaactggcgacctgaaaatctaggagggaagtttcctctgtttctctcttcaccctcgtcataccaaaggaggaactggaggcccagacccagggcctgttggtaccagtacacactggtgtgcccagagataggagagcatctcagagtcgcttgctgtcctctcgttttgatcaggtgtgtgggactttgtgtgactccagcctccactgggcctgcaggaaaagcactgtactagacggactgagcgggctggcaaggc

SEQ ID NO: 193 - DNA, 495 bp, Artificial Sequence
  source: /note="Description of Artificial Sequence: Synthetic polynucleotide"
gcctccctcgcgccatcaggatgatcctagacggaccccgcaaaaaccagacccaagccgcccgcgcccgcgccccagcagcccgcgctcaccgagcaccaggagccgcgtgcctggcccgaagtactgggtctcgtcgacgatgatcctagacggatcatgctggcacagagatacagggccgagtcctccagctccaaggcgttcacattcagctcagagctataattagggaactggcgacctgaaaatctaggagggaagtttcctctgtttctctcttcaccctcgtcataccaaaggaggaactggaggcccagacccagggcctgttggtaccagtacacactggtgtgcccagagataggagagcatctcagagtcgcttgctgtcctctcgttttgatcaggtgtgtgggactttgtgtgactccagcctccactgggcctgcaggaaaaggatgatcctagacggactgagcgggctggcaaggc

SEQ ID NO: 194 - DNA, 495 bp, Artificial Sequence
  source: /note="Description of Artificial Sequence: Synthetic polynucleotide"
gcctccctcgcgccatcagcgccaatatagacggaccgccgccttccacctgaatcccgccgcccgggtggtcccgcgaaaactcacccagcacggtcagcctgctgccggccccgaaagtcaggacgttggcccgtcgaccgccaatatagacggatcatgctggcacagagatacagggccgagtcctccagctccaaggcgttcacattcagctcagagctataattagggaactggcgacctgaaaatctaggagggaagtttcctctgtttctctcttcaccctcgtcataccaaaggaggaactggaggcccagacccagggcctgttggtaccagtacacactggtgtgcccagagataggagagcatctcagagtcgcttgctgtcctctcgttttgatcaggtgtgtgggactttgtgtgactccagcctccactgggcctgcaggaaaagcgccaatatagacggactgagcgggctggcaaggc

SEQ ID NO: 195 - DNA, 495 bp, Artificial Sequence
  source: /note="Description of Artificial Sequence: Synthetic polynucleotide"
gcctccctcgcgccatcagtcaagccttagacggaccaccctccgactccggggaccgaggggctggaaggtggggagacgcccgaatctcacctgtgaccgtgagcctggtgcccggcccgaagtactgctcgtgtcgactcaagccttagacggatcatgctggcacagagatacagggccgagtcctccagctccaaggcgttcacattcagctcagagctataattagggaactggcgacctgaaaatctaggagggaagtttcctctgtttctctcttcaccctcgtcataccaaaggaggaactggaggcccagacccagggcctgttggtaccagtacacactggtgtgcccagagataggagagcatctcagagtcgcttgctgtcctctcgttttgatcaggtgtgtgggactttgtgtgactccagcctccactgggcctgcaggaaaagtcaagccttagacggactgagcgggctggcaaggc

SEQ ID NO: 196 - DNA, 495 bp, Artificial Sequence
  source: /note="Description of Artificial Sequence: Synthetic polynucleotide"
gcctccctcgcgccatcagagagtgtccagctcttctgtggacccacttttccctgtgacggatctgcaaaagaacctgaaaaatgtcttacctacaactgtgagtctggtgccttgtccaaagaaagcttcagtgtcgacagagtgtccagctctttcactgctggcacagaagtacacagatgtctgggagggagcagccgactccagcctgagcgagaactcccgtttgtttaatctggagacattgtagccattggggacttctcctttgtcagtggtaccctcagaagctgagtaataaatcagcctcagtcccatgcctgggtcttgtcgataccagtacatggagttatggttcatatcctgggcacactgcagtgtcatgctctgtcctgtcttcaggacctggaattttggggtctgagtgacaccagcattcactggacctgcagagaagagagtgtccagctcttctgagcgggctggcaaggc

SEQ ID NO: 197 - DNA, 495 bp, Artificial Sequence
  source: /note="Description of Artificial Sequence: Synthetic polynucleotide"
gcctccctcgcgccatcaggttccgaacagctcttatttcccaggacagagtcctccctcatcgcacccctcctagagacccccagccttacctacaacggttaacctggtccccgaaccgaaggtgtagccatagtcgacgttccgaacagctctttcactgctggcacagaagtacacagatgtctgggagggagcagccgactccagcctgagcgagaactcccgtttgtttaatctggagacattgtagccattggggacttctcctttgtcagtggtaccctcagaagctgagtaataaatcagcctcagtcccatgcctgggtcttgtcgataccagtacatggagttatggttcatatcctgggcacactgcagtgtcatgctctgtcctgtcttcaggacctggaattttggggtctgagtgacaccagcattcactggacctgcagagaaggttccgaacagctcttctgagcgggctggcaaggc

SEQ ID NO: 198 - DNA, 495 bp, Artificial Sequence
  source: /note="Description of Artificial Sequence: Synthetic polynucleotide"
gcctccctcgcgccatcagcgttacttcagctcttctggattccagcccctttttgcaagttcccagctgtccagccttgacttactcacctacaacagtgagccaacttccctctccaaaatatatggtgtttcgtcgaccgttacttcagctctttcactgctggcacagaagtacacagatgtctgggagggagcagccgactccagcctgagcgagaactcccgtttgtttaatctggagacattgtagccattggggacttctcctttgtcagtggtaccctcagaagctgagtaataaatcagcctcagtcccatgcctgggtcttgtcgataccagtacatggagttatggttcatatcctgggcacactgcagtgtcatgctctgtcctgtcttcaggacctggaattttggggtctgagtgacaccagcattcactggacctgcagagaagcgttacttcagctcttctgagcgggctggcaaggc

SEQ ID NO: 199 - DNA, 495 bp, Artificial Sequence
  source: /note="Description of Artificial Sequence: Synthetic polynucleotide"
gcctccctcgcgccatcagtaggagaccagctcttctcctggaactccgaccttatgatacactatcccgaaagaagtcttttacatacccaagacagagagctgggttccactgccaaaaaacagtttttcattgtcgactaggagaccagctctttcactgctggcacagaagtacacagatgtctgggagggagcagccgactccagcctgagcgagaactcccgtttgtttaatctggagacattgtagccattggggacttctcctttgtcagtggtaccctcagaagctgagtaataaatcagcctcagtcccatgcctgggtcttgtcgataccagtacatggagttatggttcatatcctgggcacactgcagtgtcatgctctgtcctgtcttcaggacctggaattttggggtctgagtgacaccagcattcactggacctgcagagaagtaggagaccagctcttctgagcgggctggcaaggc

SEQ ID NO: 200 - DNA, 495 bp, Artificial Sequence
  source: /note="Description of Artificial Sequence: Synthetic polynucleotide"
gcctccctcgcgccatcaggacactctcagctcttagagaactctgccttcaagggacaatggccataccaccctgattctgcaacttacctaggatggagagtcgagtcccatcaccaaaatgctggggctgatgtcgacgacactctcagctctttcactgctggcacagaagtacacagatgtctgggagggagcagccgactccagcctgagcgagaactcccgtttgtttaatctggagacattgtagccattggggacttctcctttgtcagtggtaccctcagaagctgagtaataaatcagcctcagtcccatgcctgggtcttgtcgataccagtacatggagttatggttcatatcctgggcacactgcagtgtcatgctctgtcctgtcttcaggacctggaattttggggtctgagtgacaccagcattcactggacctgcagagaaggacactctcagctcttctgagcgggctggcaaggc

SEQ ID NO: 201 - DNA, 495 bp, Artificial Sequence
  source: /note="Description of Artificial Sequence: Synthetic polynucleotide"
gcctccctcgcgccatcagttcggaaccagctcttatcattgcagtcaaacccaggcacccccgagtcaagagtggagcccccatacctgtcacagtgagcctggtcccgttcccaaagtggaggggtgaattatgtcgacttcggaaccagctctttcactgctggcacagaagtacacagatgtctgggagggagcagccgactccagcctgagcgagaactcccgtttgtttaatctggagacattgtagccattggggacttctcctttgtcagtggtaccctcagaagctgagtaataaatcagcctcagtcccatgcctgggtcttgtcgataccagtacatggagttatggttcatatcctgggcacactgcagtgtcatgctctgtcctgtcttcaggacctggaattttggggtctgagtgacaccagcattcactggacctgcagagaagttcggaaccagctcttctgagcgggctggcaaggc

SEQ ID NO: 202 - DNA, 495 bp, Artificial Sequence
  source: /note="Description of Artificial Sequence: Synthetic polynucleotide"
gcctccctcgcgccatcagaagtaacgcagctcttgggtcgtgcaggctgggctgctcaccctctctcccacctggagcccccttcttacctagcacggtgagccgtgtccctggcccgaagaactgctcattgtgtcgacaagtaacgcagctctttcactgctggcacagaagtacacagatgtctgggagggagcagccgactccagcctgagcgagaactcccgtttgtttaatctggagacattgtagccattggggacttctcctttgtcagtggtaccctcagaagctgagtaataaatcagcctcagtcccatgcctgggtcttgtcgataccagtacatggagttatggttcatatcctgggcacactgcagtgtcatgctctgtcctgtcttcaggacctggaattttggggtctgagtgacaccagcattcactggacctgcagagaagaagtaacgcagctcttctgagcgggctggcaaggc

SEQ ID NO: 203 - DNA, 495 bp, Artificial Sequence
  source: /note="Description of Artificial Sequence: Synthetic polynucleotide"
gcctccctcgcgccatcaggtctcctacagctcttcctctgcccatcccgccctctcggagctctccggagccccaaccgcctccttacccagtacggtcagcctagagccttctccaaaaaacagctccccggtgtcgacgtctcctacagctctttcactgctggcacagaagtacacagatgtctgggagggagcagccgactccagcctgagcgagaactcccgtttgtttaatctggagacattgtagccattggggacttctcctttgtcagtggtaccctcagaagctgagtaataaatcagcctcagtcccatgcctgggtcttgtcgataccagtacatggagttatggttcatatcctgggcacactgcagtgtcatgctctgtcctgtcttcaggacctggaattttggggtctgagtgacaccagcattcactggacctgcagagaaggtctcctacagctcttctgagcgggctggcaaggc

SEQ ID NO: 204 - DNA, 495 bp, Artificial Sequence
  source: /note="Description of Artificial Sequence: Synthetic polynucleotide"
gcctccctcgcgccatcaggtagacaccagctcttgcgtcccggggcgccccctccccagttccggggcttcagcgggagcccccgcttaccgagcactgtcagccgggtgcctgggccaaaatactgcgtatctgtcgacgtagacaccagctctttcactgctggcacagaagtacacagatgtctgggagggagcagccgactccagcctgagcgagaactcccgtttgtttaatctggagacattgtagccattggggacttctcctttgtcagtggtaccctcagaagctgagtaataaatcagcctcagtcccatgcctgggtcttgtcgataccagtacatggagttatggttcatatcctgggcacactgcagtgtcatgctctgtcctgtcttcaggacctggaattttggggtctgagtgacaccagcattcactggacctgcagagaaggtagacaccagctcttctgagcgggctggcaaggc

SEQ ID NO: 205 - DNA, 495 bp, Artificial Sequence
  source: /note="Description of Artificial Sequence: Synthetic polynucleotide"
gcctccctcgcgccatcagcactgtaccagctcttcgcacaaaaacccgagcgcagtctcgtccccggtcccccggcggccccagcttacccagcactgagagccgggtcccggcgccgaagtactgaatgttttgtcgaccactgtaccagctctttcactgctggcacagaagtacacagatgtctgggagggagcagccgactccagcctgagcgagaactcccgtttgtttaatctggagacattgtagccattggggacttctcctttgtcagtggtaccctcagaagctgagtaataaatcagcctcagtcccatgcctgggtcttgtcgataccagtacatggagttatggttcatatcctgggcacactgcagtgtcatgctctgtcctgtcttcaggacctggaattttggggtctgagtgacaccagcattcactggacctgcagagaagcactgtaccagctcttctgagcgggctggcaaggc

SEQ ID NO: 206 - DNA, 495 bp, Artificial Sequence
  source: /note="Description of Artificial Sequence: Synthetic polynucleotide"
gcctccctcgcgccatcaggatgatcccagctcttccccgcaaaaaccagacccaagccgcccgcgcccgcgccccagcagcccgcgctcaccgagcaccaggagccgcgtgcctggcccgaagtactgggtctcgtcgacgatgatcccagctctttcactgctggcacagaagtacacagatgtctgggagggagcagccgactccagcctgagcgagaactcccgtttgtttaatctggagacattgtagccattggggacttctcctttgtcagtggtaccctcagaagctgagtaataaatcagcctcagtcccatgcctgggtcttgtcgataccagtacatggagttatggttcatatcctgggcacactgcagtgtcatgctctgtcctgtcttcaggacctggaattttggggtctgagtgacaccagcattcactggacctgcagagaaggatgatcccagctcttctgagcgggctggcaaggc

SEQ ID NO: 207 - DNA, 495 bp, Artificial Sequence
  source: /note="Description of Artificial Sequence: Synthetic polynucleotide"
gcctccctcgcgccatcagcgccaatacagctcttccgccgccttccacctgaatcccgccgcccgggtggtcccgcgaaaactcacccagcacggtcagcctgctgccggccccgaaagtcaggacgttggcccgtcgaccgccaatacagctctttcactgctggcacagaagtacacagatgtctgggagggagcagccgactccagcctgagcgagaactcccgtttgtttaatctggagacattgtagccattggggacttctcctttgtcagtggtaccctcagaagctgagtaataaatcagcctcagtcccatgcctgggtcttgtcgataccagtacatggagttatggttcatatcctgggcacactgcagtgtcatgctctgtcctgtcttcaggacctggaattttggggtctgagtgacaccagcattcactggacctgcagagaagcgccaatacagctcttctgagcgggctggcaaggc

SEQ ID NO: 208 - DNA, 495 bp, Artificial Sequence
  source: /note="Description of Artificial Sequence: Synthetic polynucleotide"
gcctccctcgcgccatcagtcaagcctcagctcttccaccctccgactccggggaccgaggggctggaaggtggggagacgcccgaatctcacctgtgaccgtgagcctggtgcccggcccgaagtactgctcgtgtcgactcaagcctcagctctttcactgctggcacagaagtacacagatgtctgggagggagcagccgactccagcctgagcgagaactcccgtttgtttaatctggagacattgtagccattggggacttctcctttgtcagtggtaccctcagaagctgagtaataaatcagcctcagtcccatgcctgggtcttgtcgataccagtacatggagttatggttcatatcctgggcacactgcagtgtcatgctctgtcctgtcttcaggacctggaattttggggtctgagtgacaccagcattcactggacctgcagagaagtcaagcctcagctcttctgagcgggctggcaaggc

SEQ ID NO: 209 - DNA, 495 bp, Artificial Sequence
  source: /note="Description of Artificial Sequence: Synthetic polynucleotide"
gcctccctcgcgccatcagagagtgtcgagcgatactgtggacccacttttccctgtgacggatctgcaaaagaacctgaaaaatgtcttacctacaactgtgagtctggtgccttgtccaaagaaagcttcagtgtcgacagagtgtcgagcgatatcactgctggcacagaagtacacagatgtttgggagggagcagccgactccaaccccagcaggaaattctgtttttttaatctggagacattgtagccatcagggacctctcctttggcagttgtaccctcaccaactgagtaatgaatcagcctcagccccatgcctgggtcttgtcgataccagtacatgtattcatggttcatatcctgggcacacagcagtgtcatgctctgtcctgtcttcaggacccggaattttggggtctgagtgacaccagcattcactggacctgcagagaagagagtgtcgagcgatactgagcgggctggcaaggc

SEQ ID NO: 210 - DNA, 495 bp, Artificial Sequence
  source: /note="Description of Artificial Sequence: Synthetic polynucleotide"
gcctccctcgcgccatcaggttccgaagagcgataatttcccaggacagagtcctccctcatcgcacccctcctagagacccccagccttacctacaacggttaacctggtccccgaaccgaaggtgtagccatagtcgacgttccgaagagcgatatcactgctggcacagaagtacacagatgtttgggagggagcagccgactccaaccccagcaggaaattctgtttttttaatctggagacattgtagccatcagggacctctcctttggcagttgtaccctcaccaactgagtaatgaatcagcctcagccccatgcctgggtcttgtcgataccagtacatgtattcatggttcatatcctgggcacacagcagtgtcatgctctgtcctgtcttcaggacccggaattttggggtctgagtgacaccagcattcactggacctgcagagaaggttccgaagagcgatactgagcgggctggcaaggc

SEQ ID NO: 211 - DNA, 495 bp, Artificial Sequence
  source: /note="Description of Artificial Sequence: Synthetic polynucleotide"
gcctccctcgcgccatcagcgttacttgagcgatactggattccagcccctttttgcaagttcccagctgtccagccttgacttactcacctacaacagtgagccaacttccctctccaaaatatatggtgtttcgtcgaccgttacttgagcgatatcactgctggcacagaagtacacagatgtttgggagggagcagccgactccaaccccagcaggaaattctgtttttttaatctggagacattgtagccatcagggacctctcctttggcagttgtaccctcaccaactgagtaatgaatcagcctcagccccatgcctgggtcttgtcgataccagtacatgtattcatggttcatatcctgggcacacagcagtgtcatgctctgtcctgtcttcaggacccggaattttggggtctgagtgacaccagcattcactggacctgcagagaagcgttacttgagcgatactgagcgggctggcaaggc

SEQ ID NO: 212 - DNA, 495 bp, Artificial Sequence
  source: /note="Description of Artificial Sequence: Synthetic polynucleotide"
gcctccctcgcgccatcagtaggagacgagcgatactcctggaactccgaccttatgatacactatcccgaaagaagtcttttacatacccaagacagagagctgggttccactgccaaaaaacagtttttcattgtcgactaggagacgagcgatatcactgctggcacagaagtacacagatgtttgggagggagcagccgactccaaccccagcaggaaattctgtttttttaatctggagacattgtagccatcagggacctctcctttggcagttgtaccctcaccaactgagtaatgaatcagcctcagccccatgcctgggtcttgtcgataccagtacatgtattcatggttcatatcctgggcacacagcagtgtcatgctctgtcctgtcttcaggacccggaattttggggtctgagtgacaccagcattcactggacctgcagagaagtaggagacgagcgatactgagcgggctggcaaggc

SEQ ID NO: 213 - DNA, 495 bp, Artificial Sequence
  source: /note="Description of Artificial Sequence: Synthetic polynucleotide"
gcctccctcgcgccatcaggacactctgagcgataagagaactctgccttcaagggacaatggccataccaccctgattctgcaacttacctaggatggagagtcgagtcccatcaccaaaatgctggggctgatgtcgacgacactctgagcgatatcactgctggcacagaagtacacagatgtttgggagggagcagccgactccaaccccagcaggaaattctgtttttttaatctggagacattgtagccatcagggacctctcctttggcagttgtaccctcaccaactgagtaatgaatcagcctcagccccatgcctgggtcttgtcgataccagtacatgtattcatggttcatatcctgggcacacagcagtgtcatgctctgtcctgtcttcaggacccggaattttggggtctgagtgacaccagcattcactggacctgcagagaaggacactctgagcgatactgagcgggctggcaaggc

SEQ ID NO: 214 - DNA, 495 bp, Artificial Sequence
  source: /note="Description of Artificial Sequence: Synthetic polynucleotide"
gcctccctcgcgccatcagttcggaacgagcgataatcattgcagtcaaacccaggcacccccgagtcaagagtggagcccccatacctgtcacagtgagcctggtcccgttcccaaagtggaggggtgaattatgtcgacttcggaacgagcgatatcactgctggcacagaagtacacagatgtttgggagggagcagccgactccaaccccagcaggaaattctgtttttttaatctggagacattgtagccatcagggacctctcctttggcagttgtaccctcaccaactgagtaatgaatcagcctcagccccatgcctgggtcttgtcgataccagtacatgtattcatggttcatatcctgggcacacagcagtgtcatgctctgtcctgtcttcaggacccggaattttggggtctgagtgacaccagcattcactggacctgcagagaagttcggaacgagcgatactgagcgggctggcaaggc

SEQ ID NO: 215 - DNA, 495 bp, Artificial Sequence
  source: /note="Description of Artificial Sequence: Synthetic polynucleotide"
gcctccctcgcgccatcagaagtaacggagcgatagggtcgtgcaggctgggctgctcaccctctctcccacctggagcccccttcttacctagcacggtgagccgtgtccctggcccgaagaactgctcattgtgtcgacaagtaacggagcgatatcactgctggcacagaagtacacagatgtttgggagggagcagccgactccaaccccagcaggaaattctgtttttttaatctggagacattgtagccatcagggacctctcctttggcagttgtaccctcaccaactgagtaatgaatcagcctcagccccatgcctgggtcttgtcgataccagtacatgtattcatggttcatatcctgggcacacagcagtgtcatgctctgtcctgtcttcaggacccggaattttggggtctgagtgacaccagcattcactggacctgcagagaagaagtaacggagcgatactgagcgggctggcaaggc

SEQ ID NO: 216 - DNA, 495 bp, Artificial Sequence
  source: /note="Description of Artificial Sequence: Synthetic polynucleotide"
gcctccctcgcgccatcaggtctcctagagcgatacctctgcccatcccgccctctcggagctctccggagccccaaccgcctccttacccagtacggtcagcctagagccttctccaaaaaacagctccccggtgtcgacgtctcctagagcgatatcactgctggcacagaagtacacagatgtttgggagggagcagccgactccaaccccagcaggaaattctgtttttttaatctggagacattgtagccatcagggacctctcctttggcagttgtaccctcaccaactgagtaatgaatcagcctcagccccatgcctgggtcttgtcgataccagtacatgtattcatggttcatatcctgggcacacagcagtgtcatgctctgtcctgtcttcaggacccggaattttggggtctgagtgacaccagcattcactggacctgcagagaaggtctcctagagcgatactgagcgggctggcaaggc

SEQ ID NO: 217 - DNA, 495 bp, Artificial Sequence
  source: /note="Description of Artificial Sequence: Synthetic polynucleotide"
gcctccctcgcgccatcaggtagacacgagcgatagcgtcccggggcgccccctccccagttccggggcttcagcgggagcccccgcttaccgagcactgtcagccgggtgcctgggccaaaatactgcgtatctgtcgacgtagacacgagcgatatcactgctggcacagaagtacacagatgtttgggagggagcagccgactccaaccccagcaggaaattctgtttttttaatctggagacattgtagccatcagggacctctcctttggcagttgtaccctcaccaactgagtaatgaatcagcctcagccccatgcctgggtcttgtcgataccagtacatgtattcatggttcatatcctgggcacacagcagtgtcatgctctgtcctgtcttcaggacccggaattttggggtctgagtgacaccagcattcactggacctgcagagaaggtagacacgagcgatactgagcgggctggcaaggc

SEQ ID NO: 218 - DNA, 495 bp, Artificial Sequence
  source: /note="Description of Artificial Sequence: Synthetic polynucleotide"
gcctccctcgcgccatcagcactgtacgagcgatacgcacaaaaacccgagcgcagtctcgtccccggtcccccggcggccccagcttacccagcactgagagccgggtcccggcgccgaagtactgaatgttttgtcgaccactgtacgagcgatatcactgctggcacagaagtacacagatgtttgggagggagcagccgactccaaccccagcaggaaattctgtttttttaatctggagacattgtagccatcagggacctctcctttggcagttgtaccctcaccaactgagtaatgaatcagcctcagccccatgcctgggtcttgtcgataccagtacatgtattcatggttcatatcctgggcacacagcagtgtcatgctctgtcctgtcttcaggacccggaattttggggtctgagtgacaccagcattcactggacctgcagagaagcactgtacgagcgatactgagcgggctggcaaggc

SEQ ID NO: 219 - DNA, 495 bp, Artificial Sequence
  source: /note="Description of Artificial Sequence: Synthetic polynucleotide"
gcctccctcgcgccatcaggatgatccgagcgataccccgcaaaaaccagacccaagccgcccgcgcccgcgccccagcagcccgcgctcaccgagcaccaggagccgcgtgcctggcccgaagtactgggtctcgtcgacgatgatccgagcgatatcactgctggcacagaagtacacagatgtttgggagggagcagccgactccaaccccagcaggaaattctgtttttttaatctggagacattgtagccatcagggacctctcctttggcagttgtaccctcaccaactgagtaatgaatcagcctcagccccatgcctgggtcttgtcgataccagtacatgtattcatggttcatatcctgggcacacagcagtgtcatgctctgtcctgtcttcaggacccggaattttggggtctgagtgacaccagcattcactggacctgcagagaaggatgatccgagcgatactgagcgggctggcaaggc

SEQ ID NO: 220 - DNA, 495 bp, Artificial Sequence
  source: /note="Description of Artificial Sequence: Synthetic polynucleotide"
gcctccctcgcgccatcagcgccaatagagcgataccgccgccttccacctgaatcccgccgcccgggtggtcccgcgaaaactcacccagcacggtcagcctgctgccggccccgaaagtcaggacgttggcccgtcgaccgccaatagagcgatatcactgctggcacagaagtacacagatgtttgggagggagcagccgactccaaccccagcaggaaattctgtttttttaatctggagacattgtagccatcagggacctctcctttggcagttgtaccctcaccaactgagtaatgaatcagcctcagccccatgcctgggtcttgtcgataccagtacatgtattcatggttcatatcctgggcacacagcagtgtcatgctctgtcctgtcttcaggacccggaattttggggtctgagtgacaccagcattcactggacctgcagagaagcgccaatagagcgatactgagcgggctggcaaggc

SEQ ID NO: 221 - DNA, 495 bp, Artificial Sequence
  source: /note="Description of Artificial Sequence: Synthetic polynucleotide"
gcctccctcgcgccatcagtcaagcctgagcgataccaccctccgactccggggaccgaggggctggaaggtggggagacgcccgaatctcacctgtgaccgtgagcctggtgcccggcccgaagtactgctcgtgtcgactcaagcctgagcgatatcactgctggcacagaagtacacagatgtttgggagggagcagccgactccaaccccagcaggaaattctgtttttttaatctggagacattgtagccatcagggacctctcctttggcagttgtaccctcaccaactgagtaatgaatcagcctcagccccatgcctgggtcttgtcgataccagtacatgtattcatggttcatatcctgggcacacagcagtgtcatgctctgtcctgtcttcaggacccggaattttggggtctgagtgacaccagcattcactggacctgcagagaagtcaagcctgagcgatactgagcgggctggcaaggc

SEQ ID NO: 222 - DNA, 495 bp, Artificial Sequence
  source: /note="Description of Artificial Sequence: Synthetic polynucleotide"
gcctccctcgcgccatcagagagtgtcgcatctgactgtggacccacttttccctgtgacggatctgcaaaagaacctgaaaaatgtcttacctacaactgtgagtctggtgccttgtccaaagaaagcttcagtgtcgacagagtgtcgcatctgatcactgctggcacagaagtacacagatgtttgggagggagcagccgactccaaccccagcaggaaattctgtttttttaatctggagacattgtagccatcagggacctctcctttggcagttgtaccctcaccaactgagtaatgaatcagcctcagccccatgcctgggtcttgtcgataccagtacatgtattcatggttcatatcctgggcacacagcagtgtcatgctctgtcctgtcttcaggacccggaattttggggtctgagtgacaccagcattcactggacctgcagagaagagagtgtcgcatctgactgagcgggctggcaaggc

SEQ ID NO: 223 - DNA, 495 bp, Artificial Sequence
  source: /note="Description of Artificial Sequence: Synthetic polynucleotide"
gcctccctcgcgccatcaggttccgaagcatctgaatttcccaggacagagtcctccctcatcgcacccctcctagagacccccagccttacctacaacggttaacctggtccccgaaccgaaggtgtagccatagtcgacgttccgaagcatctgatcactgctggcacagaagtacacagatgtttgggagggagcagccgactccaaccccagcaggaaattctgtttttttaatctggagacattgtagccatcagggacctctcctttggcagttgtaccctcaccaactgagtaatgaatcagcctcagccccatgcctgggtcttgtcgataccagtacatgtattcatggttcatatcctgggcacacagcagtgtcatgctctgtcctgtcttcaggacccggaattttggggtctgagtgacaccagcattcactggacctgcagagaaggttccgaagcatctgactgagcgggctggcaaggc

SEQ ID NO: 224 - DNA, 495 bp, Artificial Sequence
  source: /note="Description of Artificial Sequence: Synthetic polynucleotide"
gcctccctcgcgccatcagcgttacttgcatctgactggattccagcccctttttgcaagttcccagctgtccagccttgacttactcacctacaacagtgagccaacttccctctccaaaatatatggtgtttcgtcgaccgttacttgcatctgatcactgctggcacagaagtacacagatgtttgggagggagcagccgactccaaccccagcaggaaattctgtttttttaatctggagacattgtagccatcagggacctctcctttggcagttgtaccctcaccaactgagtaatgaatcagcctcagccccatgcctgggtcttgtcgataccagtacatgtattcatggttcatatcctgggcacacagcagtgtcatgctctgtcctgtcttcaggacccggaattttggggtctgagtgacaccagcattcactggacctgcagagaagcgttacttgcatctgactgagcgggctggcaaggc

SEQ ID NO: 225 - DNA, 495 bp, Artificial Sequence
  source: /note="Description of Artificial Sequence: Synthetic polynucleotide"
gcctccctcgcgccatcagtaggagacgcatctgactcctggaactccgaccttatgatacactatcccgaaagaagtcttttacatacccaagacagagagctgggttccactgccaaaaaacagtttttcattgtcgactaggagacgcatctgatcactgctggcacagaagtacacagatgtttgggagggagcagccgactccaaccccagcaggaaattctgtttttttaatctggagacattgtagccatcagggacctctcctttggcagttgtaccctcaccaactgagtaatgaatcagcctcagccccatgcctgggtcttgtcgataccagtacatgtattcatggttcatatcctgggcacacagcagtgtcatgctctgtcctgtcttcaggacccggaattttggggtctgagtgacaccagcattcactggacctgcagagaagtaggagacgcatctgactgagcgggctggcaaggc

SEQ ID NO: 226 - DNA, 495 bp, Artificial Sequence
  source: /note="Description of Artificial Sequence: Synthetic polynucleotide"
gcctccctcgcgccatcaggacactctgcatctgaagagaactctgccttcaagggacaatggccataccaccctgattctgcaacttacctaggatggagagtcgagtcccatcaccaaaatgctggggctgatgtcgacgacactctgcatctgatcactgctggcacagaagtacacagatgtttgggagggagcagccgactccaaccccagcaggaaattctgtttttttaatctggagacattgtagccatcagggacctctcctttggcagttgtaccctcaccaactgagtaatgaatcagcctcagccccatgcctgggtcttgtcgataccagtacatgtattcatggttcatatcctgggcacacagcagtgtcatgctctgtcctgtcttcaggacccggaattttggggtctgagtgacaccagcattcactggacctgcagagaaggacactctgcatctgactgagcgggctggcaaggc

SEQ ID NO: 227 - DNA, 495 bp, Artificial Sequence
  source: /note="Description of Artificial Sequence: Synthetic polynucleotide"
gcctccctcgcgccatcagttcggaacgcatctgaatcattgcagtcaaacccaggcacccccgagtcaagagtggagcccccatacctgtcacagtgagcctggtcccgttcccaaagtggaggggtgaattatgtcgacttcggaacgcatctgatcactgctggcacagaagtacacagatgtttgggagggagcagccgactccaaccccagcaggaaattctgtttttttaatctggagacattgtagccatcagggacctctcctttggcagttgtaccctcaccaactgagtaatgaatcagcctcagccccatgcctgggtcttgtcgataccagtacatgtattcatggttcatatcctgggcacacagcagtgtcatgctctgtcctgtcttcaggacccggaattttggggtctgagtgacaccagcattcactggacctgcagagaagttcggaacgcatctgactgagcgggctggcaaggc

SEQ ID NO: 228 - DNA, 495 bp, Artificial Sequence
  source: /note="Description of Artificial Sequence: Synthetic polynucleotide"
gcctccctcgcgccatcagaagtaacggcatctgagggtcgtgcaggctgggctgctcaccctctctcccacctggagcccccttcttacctagcacggtgagccgtgtccctggcccgaagaactgctcattgtgtcgacaagtaacggcatctgatcactgctggcacagaagtacacagatgtttgggagggagcagccgactccaaccccagcaggaaattctgtttttttaatctggagacattgtagccatcagggacctctcctttggcagttgtaccctcaccaactgagtaatgaatcagcctcagccccatgcctgggtcttgtcgataccagtacatgtattcatggttcatatcctgggcacacagcagtgtcatgctctgtcctgtcttcaggacccggaattttggggtctgagtgacaccagcattcactggacctgcagagaagaagtaacggcatctgactgagcgggctggcaaggc

SEQ ID NO: 229 - DNA, 495 bp, Artificial Sequence
  source: /note="Description of Artificial Sequence: Synthetic polynucleotide"
gcctccctcgcgccatcaggtctcctagcatctgacctctgcccatcccgccctctcggagctctccggagccccaaccgcctccttacccagtacggtcagcctagagccttctccaaaaaacagctccccggtgtcgacgtctcctagcatctgatcactgctggcacagaagtacacagatgtttgggagggagcagccgactccaaccccagcaggaaattctgtttttttaatctggagacattgtagccatcagggacctctcctttggcagttgtaccctcaccaactgagtaatgaatcagcctcagccccatgcctgggtcttgtcgataccagtacatgtattcatggttcatatcctgggcacacagcagtgtcatgctctgtcctgtcttcaggacccggaattttggggtctgagtgacaccagcattcactggacctgcagagaaggtctcctagcatctgactgagcgggctggcaaggc

SEQ ID NO: 230 - DNA, 495 bp, Artificial Sequence
  source: /note="Description of Artificial Sequence: Synthetic polynucleotide"
gcctccctcgcgccatcaggtagacacgcatctgagcgtcccggggcgccccctccccagttccggggcttcagcgggagcccccgcttaccgagcactgtcagccgggtgcctgggccaaaatactgcgtatctgtcgacgtagacacgcatctgatcactgctggcacagaagtacacagatgtttgggagggagcagccgactccaaccccagcaggaaattctgtttttttaatctggagacattgtagccatcagggacctctcctttggcagttgtaccctcaccaactgagtaatgaatcagcctcagccccatgcctgggtcttgtcgataccagtacatgtattcatggttcatatcctgggcacacagcagtgtcatgctctgtcctgtcttcaggacccggaattttggggtctgagtgacaccagcattcactggacctgcagagaaggtagacacgcatctgactgagcgggctggcaaggc

SEQ ID NO: 231 - DNA, 495 bp, Artificial Sequence
  source: /note="Description of Artificial Sequence: Synthetic polynucleotide"
gcctccctcgcgccatcagcactgtacgcatctgacgcacaaaaacccgagcgcagtctcgtccccggtcccccggcggccccagcttacccagcactgagagccgggtcccggcgccgaagtactgaatgttttgtcgaccactgtacgcatctgatcactgctggcacagaagtacacagatgtttgggagggagcagccgactccaaccccagcaggaaattctgtttttttaatctggagacattgtagccatcagggacctctcctttggcagttgtaccctcaccaactgagtaatgaatcagcctcagccccatgcctgggtcttgtcgataccagtacatgtattcatggttcatatcctgggcacacagcagtgtcatgctctgtcctgtcttcaggacccggaattttggggtctgagtgacaccagcattcactggacctgcagagaagcactgtacgcatctgactgagcgggctggcaaggc

SEQ ID NO: 232 - DNA, 495 bp, Artificial Sequence
  source: /note="Description of Artificial Sequence: Synthetic polynucleotide"
gcctccctcgcgccatcaggatgatccgcatctgaccccgcaaaaaccagacccaagccgcccgcgcccgcgccccagcagcccgcgctcaccgagcaccaggagccgcgtgcctggcccgaagtactgggtctcgtcgacgatgatccgcatctgatcactgctggcacagaagtacacagatgtttgggagggagcagccgactccaaccccagcaggaaattctgtttttttaatctggagacattgtagccatcagggacctctcctttggcagttgtaccctcaccaactgagtaatgaatcagcctcagccccatgcctgggtcttgtcgataccagtacatgtattcatggttcatatcctgggcacacagcagtgtcatgctctgtcctgtcttcaggacccggaattttggggtctgagtgacaccagcattcactggacctgcagagaaggatgatccgcatctgactgagcgggctggcaaggc

SEQ ID NO: 233 - DNA, 495 bp, Artificial Sequence
  source: /note="Description of Artificial Sequence: Synthetic polynucleotide"
gcctccctcgcgccatcagcgccaatagcatctgaccgccgccttccacctgaatcccgccgcccgggtggtcccgcgaaaactcacccagcacggtcagcctgctgccggccccgaaagtcaggacgttggcccgtcgaccgccaatagcatctgatcactgctggcacagaagtacacagatgtttgggagggagcagccgactccaaccccagcaggaaattctgtttttttaatctggagacattgtagccatcagggacctctcctttggcagttgtaccctcaccaactgagtaatgaatcagcctcagccccatgcctgggtcttgtcgataccagtacatgtattcatggttcatatcctgggcacacagcagtgtcatgctctgtcctgtcttcaggacccggaattttggggtctgagtgacaccagcattcactggacctgcagagaagcgccaatagcatctgactgagcgggctggcaaggc

SEQ ID NO: 234 - DNA, 495 bp, Artificial Sequence
  source: /note="Description of Artificial Sequence: Synthetic polynucleotide"
gcctccctcgcgccatcagtcaagcctgcatctgaccaccctccgactccggggaccgaggggctggaaggtggggagacgcccgaatctcacctgtgaccgtgagcctggtgcccggcccgaagtactgctcgtgtcgactcaagcctgcatctgatcactgctggcacagaagtacacagatgtttgggagggagcagccgactccaaccccagcaggaaattctgtttttttaatctggagacattgtagccatcagggacctctcctttggcagttgtaccctcaccaactgagtaatgaatcagcctcagccccatgcctgggtcttgtcgataccagtacatgtattcatggttcatatcctgggcacacagcagtgtcatgctctgtcctgtcttcaggacccggaattttggggtctgagtgacaccagcattcactggacctgcagagaagtcaagcctgcatctgactgagcgggctggcaaggc

SEQ ID NO: 235 - DNA, 495 bp, Artificial Sequence
  source: /note="Description of Artificial Sequence: Synthetic polynucleotide"
gcctccctcgcgccatcagagagtgtctgctacacctgtggacccacttttccctgtgacggatctgcaaaagaacctgaaaaatgtcttacctacaactgtgagtctggtgccttgtccaaagaaagcttcagtgtcgacagagtgtctgctacactcactgctggcacagaagtacacagatgtctgagagggtacagcagacgccaacgtgagggggaaatcatctgtgtttgctctggagacactataaccatcagggacttctcctttgccagtggtacctgcagtatttgaataatggatgagccttagccccagtcctagatcttgtctataccagtacatggcattatgtctcatatcctgggtacatctcagtgtcatgcgccgtcctgctgccaggatctgagatgttggtgcctgggtgatcccagcaatcactggacctacagagaagagagtgtctgctacacctgagcgggctggcaaggc

SEQ ID NO: 236 - DNA, 495 bp, Artificial Sequence
  source: /note="Description of Artificial Sequence: Synthetic polynucleotide"
gcctccctcgcgccatcaggttccgaatgctacacatttcccaggacagagtcctccctcatcgcacccctcctagagacccccagccttacctacaacggttaacctggtccccgaaccgaaggtgtagccatagtcgacgttccgaatgctacactcactgctggcacagaagtacacagatgtctgagagggtacagcagacgccaacgtgagggggaaatcatctgtgtttgctctggagacactataaccatcagggacttctcctttgccagtggtacctgcagtatttgaataatggatgagccttagccccagtcctagatcttgtctataccagtacatggcattatgtctcatatcctgggtacatctcagtgtcatgcgccgtcctgctgccaggatctgagatgttggtgcctgggtgatcccagcaatcactggacctacagagaaggttccgaatgctacacctgagcgggctggcaaggc

SEQ ID NO: 237 - DNA, 495 bp, Artificial Sequence
  source: /note="Description of Artificial Sequence: Synthetic polynucleotide"
gcctccctcgcgccatcagcgttactttgctacacctggattccagcccctttttgcaagttcccagctgtccagccttgacttactcacctacaacagtgagccaacttccctctccaaaatatatggtgtttcgtcgaccgttactttgctacactcactgctggcacagaagtacacagatgtctgagagggtacagcagacgccaacgtgagggggaaatcatctgtgtttgctctggagacactataaccatcagggacttctcctttgccagtggtacctgcagtatttgaataatggatgagccttagccccagtcctagatcttgtctataccagtacatggcattatgtctcatatcctgggtacatctcagtgtcatgcgccgtcctgctgccaggatctgagatgttggtgcctgggtgatcccagcaatcactggacctacagagaagcgttactttgctacacctgagcgggctggcaaggc

SEQ ID NO: 238 - DNA, 495 bp, Artificial Sequence
  source: /note="Description of Artificial Sequence: Synthetic polynucleotide"
gcctccctcgcgccatcagtaggagactgctacacctcctggaactccgaccttatgatacactatcccgaaagaagtcttttacatacccaagacagagagctgggttccactgccaaaaaacagtttttcattgtcgactaggagactgctacactcactgctggcacagaagtacacagatgtctgagagggtacagcagacgccaacgtgagggggaaatcatctgtgtttgctctggagacactataaccatcagggacttctcctttgccagtggtacctgcagtatttgaataatggatgagccttagccccagtcctagatcttgtctataccagtacatggcattatgtctcatatcctgggtacatctcagtgtcatgcgccgtcctgctgccaggatctgagatgttggtgcctgggtgatcccagcaatcactggacctacagagaagtaggagactgctacacctgagcgggctggcaaggc

SEQ ID NO: 239 - DNA, 495 bp, Artificial Sequence
  source: /note="Description of Artificial Sequence: Synthetic polynucleotide"
gcctccctcgcgccatcaggacactcttgctacacagagaactctgccttcaagggacaatggccataccaccctgattctgcaacttacctaggatggagagtcgagtcccatcaccaaaatgctggggctgatgtcgacgacactcttgctacactcactgctggcacagaagtacacagatgtctgagagggtacagcagacgccaacgtgagggggaaatcatctgtgtttgctctggagacactataaccatcagggacttctcctttgccagtggtacctgcagtatttgaataatggatgagccttagccccagtcctagatcttgtctataccagtacatggcattatgtctcatatcctgggtacatctcagtgtcatgcgccgtcctgctgccaggatctgagatgttggtgcctgggtgatcccagcaatcactggacctacagagaaggacactcttgctacacctgagcgggctggcaaggc

SEQ ID NO: 240 - DNA, 495 bp, Artificial Sequence
  source: /note="Description of Artificial Sequence: Synthetic polynucleotide"
gcctccctcgcgccatcagttcggaactgctacacatcattgcagtcaaacccaggcacccccgagtcaagagtggagcccccatacctgtcacagtgagcctggtcccgttcccaaagtggaggggtgaattatgtcgacttcggaactgctacactcactgctggcacagaagtacacagatgtctgagagggtacagcagacgccaacgtgagggggaaatcatctgtgtttgctctggagacactataaccatcagggacttctcctttgccagtggtacctgcagtatttgaataatggatgagccttagccccagtcctagatcttgtctataccagtacatggcattatgtctcatatcctgggtacatctcagtgtcatgcgccgtcctgctgccaggatctgagatgttggtgcctgggtgatcccagcaatcactggacctacagagaagttcggaactgctacacctgagcgggctggcaaggc

SEQ ID NO: 241 - DNA, 495 bp, Artificial Sequence
  source: /note="Description of Artificial Sequence: Synthetic polynucleotide"
gcctccctcgcgccatcagaagtaacgtgctacacgggtcgtgcaggctgggctgctcaccctctctcccacctggagcccccttcttacctagcacggtgagccgtgtccctggcccgaagaactgctcattgtgtcgacaagtaacgtgctacactcactgctggcacagaagtacacagatgtctgagagggtacagcagacgccaacgtgagggggaaatcatctgtgtttgctctggagacactataaccatcagggacttctcctttgccagtggtacctgcagtatttgaataatggatgagccttagccccagtcctagatcttgtctataccagtacatggcattatgtctcatatcctgggtacatctcagtgtcatgcgccgtcctgctgccaggatctgagatgttggtgcctgggtgatcccagcaatcactggacctacagagaagaagtaacgtgctacacctgagcgggctggcaaggc

SEQ ID NO: 242 - DNA, 495 bp, Artificial Sequence
  source: /note="Description of Artificial Sequence: Synthetic polynucleotide"
gcctccctcgcgccatcaggtctcctatgctacaccctctgcccatcccgccctctcggagctctccggagccccaaccgcctccttacccagtacggtcagcctagagccttctccaaaaaacagctccccggtgtcgacgtctcctatgctacactcactgctggcacagaagtacacagatgtctgagagggtacagcagacgccaacgtgagggggaaatcatctgtgtttgctctggagacactataaccatcagggacttctcctttgccagtggtacctgcagtatttgaataatggatgagccttagccccagtcctagatcttgtctataccagtacatggcattatgtctcatatcctgggtacatctcagtgtcatgcgccgtcctgctgccaggatctgagatgttggtgcctgggtgatcccagcaatcactggacctacagagaaggtctcctatgctacacctgagcgggctggcaaggc

SEQ ID NO: 243 - DNA, 495 bp, Artificial Sequence
  source: /note="Description of Artificial Sequence: Synthetic polynucleotide"
gcctccctcgcgccatcaggtagacactgctacacgcgtcccggggcgccccctccccagttccggggcttcagcgggagcccccgcttaccgagcactgtcagccgggtgcctgggccaaaatactgcgtatctgtcgacgtagacactgctacactcactgctggcacagaagtacacagatgtctgagagggtacagcagacgccaacgtgagggggaaatcatctgtgtttgctctggagacactataaccatcagggacttctcctttgccagtggtacctgcagtatttgaataatggatgagccttagccccagtcctagatcttgtctataccagtacatggcattatgtctcatatcctgggtacatctcagtgtcatgcgccgtcctgctgccaggatctgagatgttggtgcctgggtgatcccagcaatcactggacctacagagaaggtagacactgctacacctgagcgggctggcaaggc

SEQ ID NO: 244 - DNA, 495 bp, Artificial Sequence
  source: /note="Description of Artificial Sequence: Synthetic polynucleotide"
gcctccctcgcgccatcagcactgtactgctacaccgcacaaaaacccgagcgcagtctcgtccccggtcccccggcggccccagcttacccagcactgagagccgggtcccggcgccgaagtactgaatgttttgtcgaccactgtactgctacactcactgctggcacagaagtacacagatgtctgagagggtacagcagacgccaacgtgagggggaaatcatctgtgtttgctctggagacactataaccatcagggacttctcctttgccagtggtacctgcagtatttgaataatggatgagccttagccccagtcctagatcttgtctataccagtacatggcattatgtctcatatcctgggtacatctcagtgtcatgcgccgtcctgctgccaggatctgagatgttggtgcctgggtgatcccagcaatcactggacctacagagaagcactgtactgctacacctgagcgggctggcaaggc

SEQ ID NO: 245 - DNA, 495 bp, Artificial Sequence
  source: /note="Description of Artificial Sequence: Synthetic polynucleotide"
gcctccctcgcgccatcaggatgatcctgctacacccccgcaaaaaccagacccaagccgcccgcgcccgcgccccagcagcccgcgctcaccgagcaccaggagccgcgtgcctggcccgaagtactgggtctcgtcgacgatgatcctgctacactcactgctggcacagaagtacacagatgtctgagagggtacagcagacgccaacgtgagggggaaatcatctgtgtttgctctggagacactataaccatcagggacttctcctttgccagtggtacctgcagtatttgaataatggatgagccttagccccagtcctagatcttgtctataccagtacatggcattatgtctcatatcctgggtacatctcagtgtcatgcgccgtcctgctgccaggatctgagatgttggtgcctgggtgatcccagcaatcactggacctacagagaaggatgatcctgctacacctgagcgggctggcaaggc

SEQ ID NO: 246 - DNA, 495 bp, Artificial Sequence
  source: /note="Description of Artificial Sequence: Synthetic polynucleotide"
gcctccctcgcgccatcagcgccaatatgctacacccgccgccttccacctgaatcccgccgcccgggtggtcccgcgaaaactcacccagcacggtcagcctgctgccggccccgaaagtcaggacgttggcccgtcgaccgccaatatgctacactcactgctggcacagaagtacacagatgtctgagagggtacagcagacgccaacgtgagggggaaatcatctgtgtttgctctggagacactataaccatcagggacttctcctttgccagtggtacctgcagtatttgaataatggatgagccttagccccagtcctagatcttgtctataccagtacatggcattatgtctcatatcctgggtacatctcagtgtcatgcgccgtcctgctgccaggatctgagatgttggtgcctgggtgatcccagcaatcactggacctacagagaagcgccaatatgctacacctgagcgggctggcaaggc

SEQ ID NO: 247 - DNA, 495 bp, Artificial Sequence
  source: /note="Description of Artificial Sequence: Synthetic polynucleotide"
gcctccctcgcgccatcagtcaagccttgctacacccaccctccgactccggggaccgaggggctggaaggtggggagacgcccgaatctcacctgtgaccgtgagcctggtgcccggcccgaagtactgctcgtgtcgactcaagccttgctacactcactgctggcacagaagtacacagatgtctgagagggtacagcagacgccaacgtgagggggaaatcatctgtgtttgctctggagacactataaccatcagggacttctcctttgccagtggtacctgcagtatttgaataatggatgagccttagccccagtcctagatcttgtctataccagtacatggcattatgtctcatatcctgggtacatctcagtgtcatgcgccgtcctgctgccaggatctgagatgttggtgcctgggtgatcccagcaatcactggacctacagagaagtcaagccttgctacacctgagcgggctggcaaggc

SEQ ID NO: 248 - DNA, 495 bp, Artificial Sequence
  source: /note="Description of Artificial Sequence: Synthetic polynucleotide"
gcctccctcgcgccatcagagagtgtcaactgccactgtggacccacttttccctgtgacggatctgcaaaagaacctgaaaaatgtcttacctacaactgtgagtctggtgccttgtccaaagaaagcttcagtgtcgacagagtgtcaactgccatcactgctggcacagaagtacacagatgtctgggagggagcagccgacagcagcctgagcgggaaatcctctgtggttgatctggagacattgtagccattggggacttctccttggtcagtgataccagcaccaactgagtaatgaatcagcctcagccccatgcctgggtcttgtcgataccaggacatgtattcatggttcatatcctgggcacactgcagtgtcatgctctgtcctgtcttcaggacctggaattttggggtctgagtgacaccagcattcactggacctgcagagaagagagtgtcaactgccactgagcgggctggcaaggc

SEQ ID NO: 249 - DNA, 495 bp, Artificial Sequence
  source: /note="Description of Artificial Sequence: Synthetic polynucleotide"
gcctccctcgcgccatcaggttccgaaaactgccaatttcccaggacagagtcctccctcatcgcacccctcctagagacccccagccttacctacaacggttaacctggtccccgaaccgaaggtgtagccatagtcgacgttccgaaaactgccatcactgctggcacagaagtacacagatgtctgggagggagcagccgacagcagcctgagcgggaaatcctctgtggttgatctggagacattgtagccattggggacttctccttggtcagtgataccagcaccaactgagtaatgaatcagcctcagccccatgcctgggtcttgtcgataccaggacatgtattcatggttcatatcctgggcacactgcagtgtcatgctctgtcctgtcttcaggacctggaattttggggtctgagtgacaccagcattcactggacctgcagagaaggttccgaaaactgccactgagcgggctggcaaggc

SEQ ID NO: 250 - DNA, 495 bp, Artificial Sequence
  source: /note="Description of Artificial Sequence: Synthetic polynucleotide"
gcctccctcgcgccatcagcgttacttaactgccactggattccagcccctttttgcaagttcccagctgtccagccttgacttactcacctacaacagtgagccaacttccctctccaaaatatatggtgtttcgtcgaccgttacttaactgccatcactgctggcacagaagtacacagatgtctgggagggagcagccgacagcagcctgagcgggaaatcctctgtggttgatctggagacattgtagccattggggacttctccttggtcagtgataccagcaccaactgagtaatgaatcagcctcagccccatgcctgggtcttgtcgataccaggacatgtattcatggttcatatcctgggcacactgcagtgtcatgctctgtcctgtcttcaggacctggaattttggggtctgagtgacaccagcattcactggacctgcagagaagcgttacttaactgccactgagcgggctggcaaggc

SEQ ID NO: 251 - DNA, 495 bp, Artificial Sequence
  source: /note="Description of Artificial Sequence: Synthetic polynucleotide"
gcctccctcgcgccatcagtaggagacaactgccactcctggaactccgaccttatgatacactatcccgaaagaagtcttttacatacccaagacagagagctgggttccactgccaaaaaacagtttttcattgtcgactaggagacaactgccatcactgctggcacagaagtacacagatgtctgggagggagcagccgacagcagcctgagcgggaaatcctctgtggttgatctggagacattgtagccattggggacttctccttggtcagtgataccagcaccaactgagtaatgaatcagcctcagccccatgcctgggtcttgtcgataccaggacatgtattcatggttcatatcctgggcacactgcagtgtcatgctctgtcctgtcttcaggacctggaattttggggtctgagtgacaccagcattcactggacctgcagagaagtaggagacaactgccactgagcgggctggcaaggc

SEQ ID NO: 252 - DNA, 495 bp, Artificial Sequence
  source: /note="Description of Artificial Sequence: Synthetic polynucleotide"
gcctccctcgcgccatcaggacactctaactgccaagagaactctgccttcaagggacaatggccataccaccctgattctgcaacttacctaggatggagagtcgagtcccatcaccaaaatgctggggctgatgtcgacgacactctaactgccatcactgctggcacagaagtacacagatgtctgggagggagcagccgacagcagcctgagcgggaaatcctctgtggttgatctggagacattgtagccattggggacttctccttggtcagtgataccagcaccaactgagtaatgaatcagcctcagccccatgcctgggtcttgtcgataccaggacatgtattcatggttcatatcctgggcacactgcagtgtcatgctctgtcctgtcttcaggacctggaattttggggtctgagtgacaccagcattcactggacctgcagagaaggacactctaactgccactgagcgggctggcaaggc

SEQ ID NO: 253 - DNA, 495 bp, Artificial Sequence
  source: /note="Description of Artificial Sequence: Synthetic polynucleotide"
gcctccctcgcgccatcagttcggaacaactgccaatcattgcagtcaaacccaggcacccccgagtcaagagtggagcccccatacctgtcacagtgagcctggtcccgttcccaaagtggaggggtgaattatgtcgacttcggaacaactgccatcactgctggcacagaagtacacagatgtctgggagggagcagccgacagcagcctgagcgggaaatcctctgtggttgatctggagacattgtagccattggggacttctccttggtcagtgataccagcaccaactgagtaatgaatcagcctcagccccatgcctgggtcttgtcgataccaggacatgtattcatggttcatatcctgggcacactgcagtgtcatgctctgtcctgtcttcaggacctggaattttggggtctgagtgacaccagcattcactggacctgcagagaagttcggaacaactgccactgagcgggctggcaaggc

SEQ ID NO: 254 - DNA, 495 bp, Artificial Sequence
  source: /note="Description of Artificial Sequence: Synthetic polynucleotide"
gcctccctcgcgccatcagaagtaacgaactgccagggtcgtgcaggctgggctgctcaccctctctcccacctggagcccccttcttacctagcacggtgagccgtgtccctggcccgaagaactgctcattgtgtcgacaagtaacgaactgccatcactgctggcacagaagtacacagatgtctgggagggagcagccgacagcagcctgagcgggaaatcctctgtggttgatctggagacattgtagccattggggacttctccttggtcagtgataccagcaccaactgagtaatgaatcagcctcagccccatgcctgggtcttgtcgataccaggacatgtattcatggttcatatcctgggcacactgcagtgtcatgctctgtcctgtcttcaggacctggaattttggggtctgagtgacaccagcattcactggacctgcagagaagaagtaacgaactgccactgagcgggctggcaaggc

SEQ ID NO: 255 - DNA, 495 bp, Artificial Sequence
  source: /note="Description of Artificial Sequence: Synthetic polynucleotide"
gcctccctcgcgccatcaggtctcctaaactgccacctctgcccatcccgccctctcggagctctccggagccccaaccgcctccttacccagtacggtcagcctagagccttctccaaaaaacagctccccggtgtcgacgtctcctaaactgccatcactgctggcacagaagtacacagatgtctgggagggagcagccgacagcagcctgagcgggaaatcctctgtggttgatctggagacattgtagccattggggacttctccttggtcagtgataccagcaccaactgagtaatgaatcagcctcagccccatgcctgggtcttgtcgataccaggacatgtattcatggttcatatcctgggcacactgcagtgtcatgctctgtcctgtcttcaggacctggaattttggggtctgagtgacaccagcattcactggacctgcagagaaggtctcctaaactgccactgagcgggctggcaaggc

SEQ ID NO: 256 - DNA, 495 bp, Artificial Sequence
  source: /note="Description of Artificial Sequence: Synthetic polynucleotide"
gcctccctcgcgccatcaggtagacacaactgccagcgtcccggggcgccccctccccagttccggggcttcagcgggagcccccgcttaccgagcactgtcagccgggtgcctgggccaaaatactgcgtatctgtcgacgtagacacaactgccatcactgctggcacagaagtacacagatgtctgggagggagcagccgacagcagcctgagcgggaaatcctctgtggttgatctggagacattgtagccattggggacttctccttggtcagtgataccagcaccaactgagtaatgaatcagcctcagccccatgcctgggtcttgtcgataccaggacatgtattcatggttcatatcctgggcacactgcagtgtcatgctctgtcctgtcttcaggacctggaattttggggtctgagtgacaccagcattcactggacctgcagagaaggtagacacaactgccactgagcgggctggcaaggc

SEQ ID NO: 257 - DNA, 495 bp, Artificial Sequence
  source: /note="Description of Artificial Sequence: Synthetic polynucleotide"
gcctccctcgcgccatcagcactgtacaactgccacgcacaaaaacccgagcgcagtctcgtccccggtcccccggcggccccagcttacccagcactgagagccgggtcccggcgccgaagtactgaatgttttgtcgaccactgtacaactgccatcactgctggcacagaagtacacagatgtctgggagggagcagccgacagcagcctgagcgggaaatcctctgtggttgatctggagacattgtagccattggggacttctccttggtcagtgataccagcaccaactgagtaatgaatcagcctcagccccatgcctgggtcttgtcgataccaggacatgtattcatggttcatatcctgggcacactgcagtgtcatgctctgtcctgtcttcaggacctggaattttggggtctgagtgacaccagcattcactggacctgcagagaagcactgtacaactgccactgagcgggctggcaaggc

SEQ ID NO: 258 - DNA, 495 bp, Artificial Sequence
  source: /note="Description of Artificial Sequence: Synthetic polynucleotide"
gcctccctcgcgccatcaggatgatccaactgccaccccgcaaaaaccagacccaagccgcccgcgcccgcgccccagcagcccgcgctcaccgagcaccaggagccgcgtgcctggcccgaagtactgggtctcgtcgacgatgatccaactgccatcactgctggcacagaagtacacagatgtctgggagggagcagccgacagcagcctgagcgggaaatcctctgtggttgatctggagacattgtagccattggggacttctccttggtcagtgataccagcaccaactgagtaatgaatcagcctcagccccatgcctgggtcttgtcgataccaggacatgtattcatggttcatatcctgggcacactgcagtgtcatgctctgtcctgtcttcaggacctggaattttggggtctgagtgacaccagcattcactggacctgcagagaaggatgatccaactgccactgagcgggctggcaaggc

SEQ ID NO: 259 - DNA, 495 bp, Artificial Sequence
  source: /note="Description of Artificial Sequence: Synthetic polynucleotide"
gcctccctcgcgccatcagcgccaataaactgccaccgccgccttccacctgaatcccgccgcccgggtggtcccgcgaaaactcacccagcacggtcagcctgctgccggccccgaaagtcaggacgttggcccgtcgaccgccaataaactgccatcactgctggcacagaagtacacagatgtctgggagggagcagccgacagcagcctgagcgggaaatcctctgtggttgatctggagacattgtagccattggggacttctccttggtcagtgataccagcaccaactgagtaatgaatcagcctcagccccatgcctgggtcttgtcgataccaggacatgtattcatggttcatatcctgggcacactgcagtgtcatgctctgtcctgtcttcaggacctggaattttggggtctgagtgacaccagcattcactggacctgcagagaagcgccaataaactgccactgagcgggctggcaaggc

SEQ ID NO: 260 - DNA, 495 bp, Artificial Sequence
  source: /note="Description of Artificial Sequence: Synthetic polynucleotide"
gcctccctcgcgccatcagtcaagcctaactgccaccaccctccgactccggggaccgaggggctggaaggtggggagacgcccgaatctcacctgtgaccgtgagcctggtgcccggcccgaagtactgctcgtgtcgactcaagcctaactgccatcactgctggcacagaagtacacagatgtctgggagggagcagccgacagcagcctgagcgggaaatcctctgtggttgatctggagacattgtagccattggggacttctccttggtcagtgataccagcaccaactgagtaatgaatcagcctcagccccatgcctgggtcttgtcgataccaggacatgtattcatggttcatatcctgggcacactgcagtgtcatgctctgtcctgtcttcaggacctggaattttggggtctgagtgacaccagcattcactggacctgcagagaagtcaagcctaactgccactgagcgggctggcaaggc

SEQ ID NO: 261 - DNA, 495 bp, Artificial Sequence
  source: /note="Description of Artificial Sequence: Synthetic polynucleotide"
gcctccctcgcgccatcagagagtgtcttggactgctgtggacccacttttccctgtgacggatctgcaaaagaacctgaaaaatgtcttacctacaactgtgagtctggtgccttgtccaaagaaagcttcagtgtcgacagagtgtcttggactgtcactgctggcacagaagtacacagatgtctgggagggagcagccaactccagcctgagcgggaaatcctctgtggttgatctggagacgttgtagccattcgggacttctcctttatcagtgataccagcaccaactgaataataaatcagcttcagccccatgcctgggtcttgtcgataccagtacatgtagttatggttcatatcctgggtacactgcagtgtcatgctctgtcctatcttcaggatgcggaattttggggtctgagtgacaccagcattcactggacctgcagagaagagagtgtcttggactgctgagcgggctggcaaggc

SEQ ID NO: 262 - DNA, 495 bp, Artificial Sequence
  source: /note="Description of Artificial Sequence: Synthetic polynucleotide"
gcctccctcgcgccatcaggttccgaattggactgatttcccaggacagagtcctccctcatcgcacccctcctagagacccccagccttacctacaacggttaacctggtccccgaaccgaaggtgtagccatagtcgacgttccgaattggactgtcactgctggcacagaagtacacagatgtctgggagggagcagccaactccagcctgagcgggaaatcctctgtggttgatctggagacgttgtagccattcgggacttctcctttatcagtgataccagcaccaactgaataataaatcagcttcagccccatgcctgggtcttgtcgataccagtacatgtagttatggttcatatcctgggtacactgcagtgtcatgctctgtcctatcttcaggatgcggaattttggggtctgagtgacaccagcattcactggacctgcagagaaggttccgaattggactgctgagcgggctggcaaggc

SEQ ID NO: 263 - DNA, 495 bp, Artificial Sequence
  source: /note="Description of Artificial Sequence: Synthetic polynucleotide"
gcctccctcgcgccatcagcgttacttttggactgctggattccagcccctttttgcaagttcccagctgtccagccttgacttactcacctacaacagtgagccaacttccctctccaaaatatatggtgtttcgtcgaccgttacttttggactgtcactgctggcacagaagtacacagatgtctgggagggagcagccaactccagcctgagcgggaaatcctctgtggttgatctggagacgttgtagccattcgggacttctcctttatcagtgataccagcaccaactgaataataaatcagcttcagccccatgcctgggtcttgtcgataccagtacatgtagttatggttcatatcctgggtacactgcagtgtcatgctctgtcctatcttcaggatgcggaattttggggtctgagtgacaccagcattcactggacctgcagagaagcgttacttttggactgctgagcgggctggcaaggc

SEQ ID NO: 264 - DNA, 495 bp, Artificial Sequence
  source: /note="Description of Artificial Sequence: Synthetic polynucleotide"
gcctccctcgcgccatcagtaggagacttggactgctcctggaactccgaccttatgatacactatcccgaaagaagtcttttacatacccaagacagagagctgggttccactgccaaaaaacagtttttcattgtcgactaggagacttggactgtcactgctggcacagaagtacacagatgtctgggagggagcagccaactccagcctgagcgggaaatcctctgtggttgatctggagacgttgtagccattcgggacttctcctttatcagtgataccagcaccaactgaataataaatcagcttcagccccatgcctgggtcttgtcgataccagtacatgtagttatggttcatatcctgggtacactgcagtgtcatgctctgtcctatcttcaggatgcggaattttggggtctgagtgacaccagcattcactggacctgcagagaagtaggagacttggactgctgagcgggctggcaaggc

SEQ ID NO: 265 - DNA, 495 bp, Artificial Sequence
  source: /note="Description of Artificial Sequence: Synthetic polynucleotide"
gcctccctcgcgccatcaggacactctttggactgagagaactctgccttcaagggacaatggccataccaccctgattctgcaacttacctaggatggagagtcgagtcccatcaccaaaatgctggggctgatgtcgacgacactctttggactgtcactgctggcacagaagtacacagatgtctgggagggagcagccaactccagcctgagcgggaaatcctctgtggttgatctggagacgttgtagccattcgggacttctcctttatcagtgataccagcaccaactgaataataaatcagcttcagccccatgcctgggtcttgtcgataccagtacatgtagttatggttcatatcctgggtacactgcagtgtcatgctctgtcctatcttcaggatgcggaattttggggtctgagtgacaccagcattcactggacctgcagagaaggacactctttggactgctgagcgggctggcaaggc

SEQ ID NO: 266 - DNA, 495 bp, Artificial Sequence
  source: /note="Description of Artificial Sequence: Synthetic polynucleotide"
gcctccctcgcgccatcagttcggaacttggactgatcattgcagtcaaacccaggcacccccgagtcaagagtggagcccccatacctgtcacagtgagcctggtcccgttcccaaagtggaggggtgaattatgtcgacttcggaacttggactgtcactgctggcacagaagtacacagatgtctgggagggagcagccaactccagcctgagcgggaaatcctctgtggttgatctggagacgttgtagccattcgggacttctcctttatcagtgataccagcaccaactgaataataaatcagcttcagccccatgcctgggtcttgtcgataccagtacatgtagttatggttcatatcctgggtacactgcagtgtcatgctctgtcctatcttcaggatgcggaattttggggtctgagtgacaccagcattcactggacctgcagagaagttcggaacttggactgctgagcgggctggcaaggc

SEQ ID NO: 267 - DNA, 495 bp, Artificial Sequence
  source: /note="Description of Artificial Sequence: Synthetic polynucleotide"
gcctccctcgcgccatcagaagtaacgttggactggggtcgtgcaggctgggctgctcaccctctctcccacctggagcccccttcttacctagcacggtgagccgtgtccctggcccgaagaactgctcattgtgtcgacaagtaacgttggactgtcactgctggcacagaagtacacagatgtctgggagggagcagccaactccagcctgagcgggaaatcctctgtggttgatctggagacgttgtagccattcgggacttctcctttatcagtgataccagcaccaactgaataataaatcagcttcagccccatgcctgggtcttgtcgataccagtacatgtagttatggttcatatcctgggtacactgcagtgtcatgctctgtcctatcttcaggatgcggaattttggggtctgagtgacaccagcattcactggacctgcagagaagaagtaacgttggactgctgagcgggctggcaaggc

SEQ ID NO: 268 - DNA, 495 bp, Artificial Sequence
  source: /note="Description of Artificial Sequence: Synthetic polynucleotide"
gcctccctcgcgccatcaggtctcctattggactgcctctgcccatcccgccctctcggagctctccggagccccaaccgcctccttacccagtacggtcagcctagagccttctccaaaaaacagctccccggtgtcgacgtctcctattggactgtcactgctggcacagaagtacacagatgtctgggagggagcagccaactccagcctgagcgggaaatcctctgtggttgatctggagacgttgtagccattcgggacttctcctttatcagtgataccagcaccaactgaataataaatcagcttcagccccatgcctgggtcttgtcgataccagtacatgtagttatggttcatatcctgggtacactgcagtgtcatgctctgtcctatcttcaggatgcggaattttggggtctgagtgacaccagcattcactggacctgcagagaaggtctcctattggactgctgagcgggctggcaaggc

SEQ ID NO: 269 - DNA, 495 bp, Artificial Sequence
  source: /note="Description of Artificial Sequence: Synthetic polynucleotide"
gcctccctcgcgccatcaggtagacacttggactggcgtcccggggcgccccctccccagttccggggcttcagcgggagcccccgcttaccgagcactgtcagccgggtgcctgggccaaaatactgcgtatctgtcgacgtagacacttggactgtcactgctggcacagaagtacacagatgtctgggagggagcagccaactccagcctgagcgggaaatcctctgtggttgatctggagacgttgtagccattcgggacttctcctttatcagtgataccagcaccaactgaataataaatcagcttcagccccatgcctgggtcttgtcgataccagtacatgtagttatggttcatatcctgggtacactgcagtgtcatgctctgtcctatcttcaggatgcggaattttggggtctgagtgacaccagcattcactggacctgcagagaaggtagacacttggactgctgagcgggctggcaaggc

SEQ ID NO: 270 - DNA, 495 bp, Artificial Sequence
  source: /note="Description of Artificial Sequence: Synthetic polynucleotide"
gcctccctcgcgccatcagcactgtacttggactgcgcacaaaaacccgagcgcagtctcgtccccggtcccccggcggccccagcttacccagcactgagagccgggtcccggcgccgaagtactgaatgttttgtcgaccactgtacttggactgtcactgctggcacagaagtacacagatgtctgggagggagcagccaactccagcctgagcgggaaatcctctgtggttgatctggagacgttgtagccattcgggacttctcctttatcagtgataccagcaccaactgaataataaatcagcttcagccccatgcctgggtcttgtcgataccagtacatgtagttatggttcatatcctgggtacactgcagtgtcatgctctgtcctatcttcaggatgcggaattttggggtctgagtgacaccagcattcactggacctgcagagaagcactgtacttggactgctgagcgggctggcaaggc

SEQ ID NO: 271 - DNA, 495 bp, Artificial Sequence
  source: /note="Description of Artificial Sequence: Synthetic polynucleotide"
gcctccctcgcgccatcaggatgatccttggactgccccgcaaaaaccagacccaagccgcccgcgcccgcgccccagcagcccgcgctcaccgagcaccaggagccgcgtgcctggcccgaagtactgggtctcgtcgacgatgatccttggactgtcactgctggcacagaagtacacagatgtctgggagggagcagccaactccagcctgagcgggaaatcctctgtggttgatctggagacgttgtagccattcgggacttctcctttatcagtgataccagcaccaactgaataataaatcagcttcagccccatgcctgggtcttgtcgataccagtacatgtagttatggttcatatcctgggtacactgcagtgtcatgctctgtcctatcttcaggatgcggaattttggggtctgagtgacaccagcattcactggacctgcagagaaggatgatccttggactgctgagcgggctggcaaggc

SEQ ID NO: 272 - DNA, 495 bp, Artificial Sequence
  source: /note="Description of Artificial Sequence: Synthetic polynucleotide"
gcctccctcgcgccatcagcgccaatattggactgccgccgccttccacctgaatcccgccgcccgggtggtcccgcgaaaactcacccagcacggtcagcctgctgccggccccgaaagtcaggacgttggcccgtcgaccgccaatattggactgtcactgctggcacagaagtacacagatgtctgggagggagcagccaactccagcctgagcgggaaatcctctgtggttgatctggagacgttgtagccattcgggacttctcctttatcagtgataccagcaccaactgaataataaatcagcttcagccccatgcctgggtcttgtcgataccagtacatgtagttatggttcatatcctgggtacactgcagtgtcatgctctgtcctatcttcaggatgcggaattttggggtctgagtgacaccagcattcactggacctgcagagaagcgccaatattggactgctgagcgggctggcaaggc

SEQ ID NO: 273 - DNA, 495 bp, Artificial Sequence
  source: /note="Description of Artificial Sequence: Synthetic polynucleotide"
gcctccctcgcgccatcagtcaagcctttggactgccaccctccgactccggggaccgaggggctggaaggtggggagacgcccgaatctcacctgtgaccgtgagcctggtgcccggcccgaagtactgctcgtgtcgactcaagcctttggactgtcactgctggcacagaagtacacagatgtctgggagggagcagccaactccagcctgagcgggaaatcctctgtggttgatctggagacgttgtagccattcgggacttctcctttatcagtgataccagcaccaactgaataataaatcagcttcagccccatgcctgggtcttgtcgataccagtacatgtagttatggttcatatcctgggtacactgcagtgtcatgctctgtcctatcttcaggatgcggaattttggggtctgagtgacaccagcattcactggacctgcagagaagtcaagcctttggactgctgagcgggctggcaaggc

SEQ ID NO: 274 - DNA, 495 bp, Artificial Sequence
  source: /note="Description of Artificial Sequence: Synthetic polynucleotide"
gcctccctcgcgccatcagagagtgtccgtacgtactgtggacccacttttccctgtgacggatctgcaaaagaacctgaaaaatgtcttacctacaactgtgagtctggtgccttgtccaaagaaagcttcagtgtcgacagagtgtccgtacgtatcactgctggcacagaagtaaacagaagtctgagagggagcagctgactccagcttgagggggaaatcctctgtgtttgatctggagacattgtagccattgggaacttctcctttgtcagtgagagcagcagcaactgagtagtaaatcagcctcagccccttgcctgggtcttgtcgataccgatacatgtattcatggttcatatcctgggcacacagcagagtcatgctctgtcctgtcttcaggacgtggaattttggggtctgagtgacaccagcattcattggacctgcagggaagagagtgtccgtacgtactgagcgggctggcaaggc

SEQ ID NO: 275 - DNA, 495 bp, Artificial Sequence
  source: /note="Description of Artificial Sequence: Synthetic polynucleotide"
gcctccctcgcgccatcaggttccgaacgtacgtaatttcccaggacagagtcctccctcatcgcacccctcctagagacccccagccttacctacaacggttaacctggtccccgaaccgaaggtgtagccatagtcgacgttccgaacgtacgtatcactgctggcacagaagtaaacagaagtctgagagggagcagctgactccagcttgagggggaaatcctctgtgtttgatctggagacattgtagccattgggaacttctcctttgtcagtgagagcagcagcaactgagtagtaaatcagcctcagccccttgcctgggtcttgtcgataccgatacatgtattcatggttcatatcctgggcacacagcagagtcatgctctgtcctgtcttcaggacgtggaattttggggtctgagtgacaccagcattcattggacctgcagggaaggttccgaacgtacgtactgagcgggctggcaaggc

SEQ ID NO: 276 - DNA, 495 bp, Artificial Sequence
  source: /note="Description of Artificial Sequence: Synthetic polynucleotide"
gcctccctcgcgccatcagcgttacttcgtacgtactggattccagcccctttttgcaagttcccagctgtccagccttgacttactcacctacaacagtgagccaacttccctctccaaaatatatggtgtttcgtcgaccgttacttcgtacgtatcactgctggcacagaagtaaacagaagtctgagagggagcagctgactccagcttgagggggaaatcctctgtgtttgatctggagacattgtagccattgggaacttctcctttgtcagtgagagcagcagcaactgagtagtaaatcagcctcagccccttgcctgggtcttgtcgataccgatacatgtattcatggttcatatcctgggcacacagcagagtcatgctctgtcctgtcttcaggacgtggaattttggggtctgagtgacaccagcattcattggacctgcagggaagcgttacttcgtacgtactgagcgggctggcaaggc

SEQ ID NO: 277 - DNA, 495 bp, Artificial Sequence
  source: /note="Description of Artificial Sequence: Synthetic polynucleotide"
gcctccctcgcgccatcagtaggagaccgtacgtactcctggaactccgaccttatgatacactatcccgaaagaagtcttttacatacccaagacagagagctgggttccactgccaaaaaacagtttttcattgtcgactaggagaccgtacgtatcactgctggcacagaagtaaacagaagtctgagagggagcagctgactccagcttgagggggaaatcctctgtgtttgatctggagacattgtagccattgggaacttctcctttgtcagtgagagcagcagcaactgagtagtaaatcagcctcagccccttgcctgggtcttgtcgataccgatacatgtattcatggttcatatcctgggcacacagcagagtcatgctctgtcctgtcttcaggacgtggaattttggggtctgagtgacaccagcattcattggacctgcagggaagtaggagaccgtacgtactgagcgggctggcaaggc

SEQ ID NO: 278 - DNA, 495 bp, Artificial Sequence
  source: /note="Description of Artificial Sequence: Synthetic polynucleotide"
gcctccctcgcgccatcaggacactctcgtacgtaagagaactctgccttcaagggacaatggccataccaccctgattctgcaacttacctaggatggagagtcgagtcccatcaccaaaatgctggggctgatgtcgacgacactctcgtacgtatcactgctggcacagaagtaaacagaagtctgagagggagcagctgactccagcttgagggggaaatcctctgtgtttgatctggagacattgtagccattgggaacttctcctttgtcagtgagagcagcagcaactgagtagtaaatcagcctcagccccttgcctgggtcttgtcgataccgatacatgtattcatggttcatatcctgggcacacagcagagtcatgctctgtcctgtcttcaggacgtggaattttggggtctgagtgacaccagcattcattggacctgcagggaaggacactctcgtacgtactgagcgggctggcaaggc

SEQ ID NO: 279 - DNA, 495 bp, Artificial Sequence
  source: /note="Description of Artificial Sequence: Synthetic polynucleotide"
gcctccctcgcgccatcagttcggaaccgtacgtaatcattgcagtcaaacccaggcacccccgagtcaagagtggagcccccatacctgtcacagtgagcctggtcccgttcccaaagtggaggggtgaattatgtcgacttcggaaccgtacgtatcactgctggcacagaagtaaacagaagtctgagagggagcagctgactccagcttgagggggaaatcctctgtgtttgatctggagacattgtagccattgggaacttctcctttgtcagtgagagcagcagcaactgagtagtaaatcagcctcagccccttgcctgggtcttgtcgataccgatacatgtattcatggttcatatcctgggcacacagcagagtcatgctctgtcctgtcttcaggacgtggaattttggggtctgagtgacaccagcattcattggacctgcagggaagttcggaaccgtacgtactgagcgggctggcaaggc

SEQ ID NO: 280 - DNA, 495 bp, Artificial Sequence
  source: /note="Description of Artificial Sequence: Synthetic polynucleotide"
gcctccctcgcgccatcagaagtaacgcgtacgtagggtcgtgcaggctgggctgctcaccctctctcccacctggagcccccttcttacctagcacggtgagccgtgtccctggcccgaagaactgctcattgtgtcgacaagtaacgcgtacgtatcactgctggcacagaagtaaacagaagtctgagagggagcagctgactccagcttgagggggaaatcctctgtgtttgatctggagacattgtagccattgggaacttctcctttgtcagtgagagcagcagcaactgagtagtaaatcagcctcagccccttgcctgggtcttgtcgataccgatacatgtattcatggttcatatcctgggcacacagcagagtcatgctctgtcctgtcttcaggacgtggaattttggggtctgagtgacaccagcattcattggacctgcagggaagaagtaacgcgtacgtactgagcgggctggcaaggc

SEQ ID NO: 281 - DNA, 495 bp, Artificial Sequence
  source: /note="Description of Artificial Sequence: Synthetic polynucleotide"
gcctccctcgcgccatcaggtctcctacgtacgtacctctgcccatcccgccctctcggagctctccggagccccaaccgcctccttacccagtacggtcagcctagagccttctccaaaaaacagctccccggtgtcgacgtctcctacgtacgtatcactgctggcacagaagtaaacagaagtctgagagggagcagctgactccagcttgagggggaaatcctctgtgtttgatctggagacattgtagccattgggaacttctcctttgtcagtgagagcagcagcaactgagtagtaaatcagcctcagccccttgcctgggtcttgtcgataccgatacatgtattcatggttcatatcctgggcacacagcagagtcatgctctgtcctgtcttcaggacgtggaattttggggtctgagtgacaccagcattcattggacctgcagggaaggtctcctacgtacgtactgagcgggctggcaaggc

SEQ ID NO: 282 - DNA, 495 bp, Artificial Sequence
  source: /note="Description of Artificial Sequence: Synthetic polynucleotide"
gcctccctcgcgccatcaggtagacaccgtacgtagcgtcccggggcgccccctccccagttccggggcttcagcgggagcccccgcttaccgagcactgtcagccgggtgcctgggccaaaatactgcgtatctgtcgacgtagacaccgtacgtatcactgctggcacagaagtaaacagaagtctgagagggagcagctgactccagcttgagggggaaatcctctgtgtttgatctggagacattgtagccattgggaacttctcctttgtcagtgagagcagcagcaactgagtagtaaatcagcctcagccccttgcctgggtcttgtcgataccgatacatgtattcatggttcatatcctgggcacacagcagagtcatgctctgtcctgtcttcaggacgtggaattttggggtctgagtgacaccagcattcattggacctgcagggaaggtagacaccgtacgtactgagcgggctggcaaggc

SEQ ID NO: 283 - DNA, 495 bp, Artificial Sequence
  source: /note="Description of Artificial Sequence: Synthetic polynucleotide"
gcctccctcgcgccatcagcactgtaccgtacgtacgcacaaaaacccgagcgcagtctcgtccccggtcccccggcggccccagcttacccagcactgagagccgggtcccggcgccgaagtactgaatgttttgtcgaccactgtaccgtacgtatcactgctggcacagaagtaaacagaagtctgagagggagcagctgactccagcttgagggggaaatcctctgtgtttgatctggagacattgtagccattgggaacttctcctttgtcagtgagagcagcagcaactgagtagtaaatcagcctcagccccttgcctgggtcttgtcgataccgatacatgtattcatggttcatatcctgggcacacagcagagtcatgctctgtcctgtcttcaggacgtggaattttggggtctgagtgacaccagcattcattggacctgcagggaagcactgtaccgtacgtactgagcgggctggcaaggc

SEQ ID NO: 284 - DNA, 495 bp, Artificial Sequence
  source: /note="Description of Artificial Sequence: Synthetic polynucleotide"
gcctccctcgcgccatcaggatgatcccgtacgtaccccgcaaaaaccagacccaagccgcccgcgcccgcgccccagcagcccgcgctcaccgagcaccaggagccgcgtgcctggcccgaagtactgggtctcgtcgacgatgatcccgtacgtatcactgctggcacagaagtaaacagaagtctgagagggagcagctgactccagcttgagggggaaatcctctgtgtttgatctggagacattgtagccattgggaacttctcctttgtcagtgagagcagcagcaactgagtagtaaatcagcctcagccccttgcctgggtcttgtcgataccgatacatgtattcatggttcatatcctgggcacacagcagagtcatgctctgtcctgtcttcaggacgtggaattttggggtctgagtgacaccagcattcattggacctgcagggaaggatgatcccgtacgtactgagcgggctggcaaggc

SEQ ID NO: 285 - DNA, 495 bp, Artificial Sequence
  source: /note="Description of Artificial Sequence: Synthetic polynucleotide"
gcctccctcgcgccatcagcgccaatacgtacgtaccgccgccttccacctgaatcccgccgcccgggtggtcccgcgaaaactcacccagcacggtcagcctgctgccggccccgaaagtcaggacgttggcccgtcgaccgccaatacgtacgtatcactgctggcacagaagtaaacagaagtctgagagggagcagctgactccagcttgagggggaaatcctctgtgtttgatctggagacattgtagccattgggaacttctcctttgtcagtgagagcagcagcaactgagtagtaaatcagcctcagccccttgcctgggtcttgtcgataccgatacatgtattcatggttcatatcctgggcacacagcagagtcatgctctgtcctgtcttcaggacgtggaattttggggtctgagtgacaccagcattcattggacctgcagggaagcgccaatacgtacgtactgagcgggctggcaaggc

SEQ ID NO: 286 - DNA, 495 bp, Artificial Sequence
  source: /note="Description of Artificial Sequence: Synthetic polynucleotide"
gcctccctcgcgccatcagtcaagcctcgtacgtaccaccctccgactccggggaccgaggggctggaaggtggggagacgcccgaatctcacctgtgaccgtgagcctggtgcccggcccgaagtactgctcgtgtcgactcaagcctcgtacgtatcactgctggcacagaagtaaacagaagtctgagagggagcagctgactccagcttgagggggaaatcctctgtgtttgatctggagacattgtagccattgggaacttctcctttgtcagtgagagcagcagcaactgagtagtaaatcagcctcagccccttgcctgggtcttgtcgataccgatacatgtattcatggttcatatcctgggcacacagcagagtcatgctctgtcctgtcttcaggacgtggaattttggggtctgagtgacaccagcattcattggacctgcagggaagtcaagcctcgtacgtactgagcgggctggcaaggc

SEQ ID NO: 287 - DNA, 495 bp, Artificial Sequence
  source: /note="Description of Artificial Sequence: Synthetic polynucleotide"
gcctccctcgcgccatcagagagtgtctcggtactctgtggacccacttttccctgtgacggatctgcaaaagaacctgaaaaatgtcttacctacaactgtgagtctggtgccttgtccaaagaaagcttcagtgtcgacagagtgtctcggtacttcactgctggcacacaagtacacagatgtctgggagggagcagccgacaccagcctgagtgggaaatcctctgtgtttaatctagagacattgtagccattggggacttctttgtcagtagtaccagcagcagctgagtagtaaatcagtctcagccccatgcctgggtcttgtcgataccaggacatgtatccatggttcatatcctgggcacactgcagtgtcatgctctgtcctgtcttcaggatgtggaattttggggtctgagtgacaccagcattcacgggacctgcagagaagaacagagtgtctcggtactctgagcgggctggcaaggc

SEQ ID NO: 288 - DNA, 495 bp, Artificial Sequence
  source: /note="Description of Artificial Sequence: Synthetic polynucleotide"
gcctccctcgcgccatcaggttccgaatcggtactatttcccaggacagagtcctccctcatcgcacccctcctagagacccccagccttacctacaacggttaacctggtccccgaaccgaaggtgtagccatagtcgacgttccgaatcggtacttcactgctggcacacaagtacacagatgtctgggagggagcagccgacaccagcctgagtgggaaatcctctgtgtttaatctagagacattgtagccattggggacttctttgtcagtagtaccagcagcagctgagtagtaaatcagtctcagccccatgcctgggtcttgtcgataccaggacatgtatccatggttcatatcctgggcacactgcagtgtcatgctctgtcctgtcttcaggatgtggaattttggggtctgagtgacaccagcattcacgggacctgcagagaagaacgttccgaatcggtactctgagcgggctggcaaggc

SEQ ID NO: 289 - DNA, 495 bp, Artificial Sequence
  source: /note="Description of Artificial Sequence: Synthetic polynucleotide"
gcctccctcgcgccatcagcgttactttcggtactctggattccagcccctttttgcaagttcccagctgtccagccttgacttactcacctacaacagtgagccaacttccctctccaaaatatatggtgtttcgtcgaccgttactttcggtacttcactgctggcacacaagtacacagatgtctgggagggagcagccgacaccagcctgagtgggaaatcctctgtgtttaatctagagacattgtagccattggggacttctttgtcagtagtaccagcagcagctgagtagtaaatcagtctcagccccatgcctgggtcttgtcgataccaggacatgtatccatggttcatatcctgggcacactgcagtgtcatgctctgtcctgtcttcaggatgtggaattttggggtctgagtgacaccagcattcacgggacctgcagagaagaaccgttactttcggtactctgagcgggctggcaaggc

SEQ ID NO: 290 - DNA, 495 bp, Artificial Sequence
  source: /note="Description of Artificial Sequence: Synthetic polynucleotide"
gcctccctcgcgccatcagtaggagactcggtactctcctggaactccgaccttatgatacactatcccgaaagaagtcttttacatacccaagacagagagctgggttccactgccaaaaaacagtttttcattgtcgactaggagactcggtacttcactgctggcacacaagtacacagatgtctgggagggagcagccgacaccagcctgagtgggaaatcctctgtgtttaatctagagacattgtagccattggggacttctttgtcagtagtaccagcagcagctgagtagtaaatcagtctcagccccatgcctgggtcttgtcgataccaggacatgtatccatggttcatatcctgggcacactgcagtgtcatgctctgtcctgtcttcaggatgtggaattttggggtctgagtgacaccagcattcacgggacctgcagagaagaactaggagactcggtactctgagcgggctggcaaggc

SEQ ID NO: 291 - DNA, 495 bp, Artificial Sequence
  source: /note="Description of Artificial Sequence: Synthetic polynucleotide"
gcctccctcgcgccatcaggacactcttcggtactagagaactctgccttcaagggacaatggccataccaccctgattctgcaacttacctaggatggagagtcgagtcccatcaccaaaatgctggggctgatgtcgacgacactcttcggtacttcactgctggcacacaagtacacagatgtctgggagggagcagccgacaccagcctgagtgggaaatcctctgtgtttaatctagagacattgtagccattggggacttctttgtcagtagtaccagcagcagctgagtagtaaatcagtctcagccccatgcctgggtcttgtcgataccaggacatgtatccatggttcatatcctgggcacactgcagtgtcatgctctgtcctgtcttcaggatgtggaattttggggtctgagtgacaccagcattcacgggacctgcagagaagaacgacactcttcggtactctgagcgggctggcaaggc

SEQ ID NO: 292 - DNA, 495 bp, Artificial Sequence
  source: /note="Description of Artificial Sequence: Synthetic polynucleotide"
gcctccctcgcgccatcagttcggaactcggtactatcattgcagtcaaacccaggcacccccgagtcaagagtggagcccccatacctgtcacagtgagcctggtcccgttcccaaagtggaggggtgaattatgtcgacttcggaactcggtacttcactgctggcacacaagtacacagatgtctgggagggagcagccgacaccagcctgagtgggaaatcctctgtgtttaatctagagacattgtagccattggggacttctttgtcagtagtaccagcagcagctgagtagtaaatcagtctcagccccatgcctgggtcttgtcgataccaggacatgtatccatggttcatatcctgggcacactgcagtgtcatgctctgtcctgtcttcaggatgtggaattttggggtctgagtgacaccagcattcacgggacctgcagagaagaacttcggaactcggtactctgagcgggctggcaaggc

SEQ ID NO: 293 - DNA, 495 bp, Artificial Sequence
  source: /note="Description of Artificial Sequence: Synthetic polynucleotide"
gcctccctcgcgccatcagaagtaacgtcggtactgggtcgtgcaggctgggctgctcaccctctctcccacctggagcccccttcttacctagcacggtgagccgtgtccctggcccgaagaactgctcattgtgtcgacaagtaacgtcggtacttcactgctggcacacaagtacacagatgtctgggagggagcagccgacaccagcctgagtgggaaatcctctgtgtttaatctagagacattgtagccattggggacttctttgtcagtagtaccagcagcagctgagtagtaaatcagtctcagccccatgcctgggtcttgtcgataccaggacatgtatccatggttcatatcctgggcacactgcagtgtcatgctctgtcctgtcttcaggatgtggaattttggggtctgagtgacaccagcattcacgggacctgcagagaagaacaagtaacgtcggtactctgagcgggctggcaaggc

SEQ ID NO: 294 - DNA, 495 bp, Artificial Sequence
  source: /note="Description of Artificial Sequence: Synthetic polynucleotide"
gcctccctcgcgccatcaggtctcctatcggtactcctctgcccatcccgccctctcggagctctccggagccccaaccgcctccttacccagtacggtcagcctagagccttctccaaaaaacagctccccggtgtcgacgtctcctatcggtacttcactgctggcacacaagtacacagatgtctgggagggagcagccgacaccagcctgagtgggaaatcctctgtgtttaatctagagacattgtagccattggggacttctttgtcagtagtaccagcagcagctgagtagtaaatcagtctcagccccatgcctgggtcttgtcgataccaggacatgtatccatggttcatatcctgggcacactgcagtgtcatgctctgtcctgtcttcaggatgtggaattttggggtctgagtgacaccagcattcacgggacctgcagagaagaacgtctcctatcggtactctgagcgggctggcaaggc

SEQ ID NO: 295 - DNA, 495 bp, Artificial Sequence
  source: /note="Description of Artificial Sequence: Synthetic polynucleotide"
gcctccctcgcgccatcaggtagacactcggtactgcgtcccggggcgccccctccccagttccggggcttcagcgggagcccccgcttaccgagcactgtcagccgggtgcctgggccaaaatactgcgtatctgtcgacgtagacactcggtacttcactgctggcacacaagtacacagatgtctgggagggagcagccgacaccagcctgagtgggaaatcctctgtgtttaatctagagacattgtagccattggggacttctttgtcagtagtaccagcagcagctgagtagtaaatcagtctcagccccatgcctgggtcttgtcgataccaggacatgtatccatggttcatatcctgggcacactgcagtgtcatgctctgtcctgtcttcaggatgtggaattttggggtctgagtgacaccagcattcacgggacctgcagagaagaacgtagacactcggtactctgagcgggctggcaaggc

SEQ ID NO: 296 - DNA, 495 bp, Artificial Sequence
  source: /note="Description of Artificial Sequence: Synthetic polynucleotide"
gcctccctcgcgccatcagcactgtactcggtactcgcacaaaaacccgagcgcagtctcgtccccggtcccccggcggccccagcttacccagcactgagagccgggtcccggcgccgaagtactgaatgttttgtcgaccactgtactcggtacttcactgctggcacacaagtacacagatgtctgggagggagcagccgacaccagcctgagtgggaaatcctctgtgtttaatctagagacattgtagccattggggacttctttgtcagtagtaccagcagcagctgagtagtaaatcagtctcagccccatgcctgggtcttgtcgataccaggacatgtatccatggttcatatcctgggcacactgcagtgtcatgctctgtcctgtcttcaggatgtggaattttggggtctgagtgacaccagcattcacgggacctgcagagaagaaccactgtactcggtactctgagcgggctggcaaggc

SEQ ID NO: 297 - DNA, 495 bp, Artificial Sequence
  source: /note="Description of Artificial Sequence: Synthetic polynucleotide"
gcctccctcgcgccatcaggatgatcctcggtactccccgcaaaaaccagacccaagccgcccgcgcccgcgccccagcagcccgcgctcaccgagcaccaggagccgcgtgcctggcccgaagtactgggtctcgtcgacgatgatcctcggtacttcactgctggcacacaagtacacagatgtctgggagggagcagccgacaccagcctgagtgggaaatcctctgtgtttaatctagagacattgtagccattggggacttctttgtcagtagtaccagcagcagctgagtagtaaatcagtctcagccccatgcctgggtcttgtcgataccaggacatgtatccatggttcatatcctgggcacactgcagtgtcatgctctgtcctgtcttcaggatgtggaattttggggtctgagtgacaccagcattcacgggacctgcagagaagaacgatgatcctcggtactctgagcgggctggcaaggc

SEQ ID NO: 298 - DNA, 495 bp, Artificial Sequence
  source: /note="Description of Artificial Sequence: Synthetic polynucleotide"
gcctccctcgcgccatcagcgccaatatcggtactccgccgccttccacctgaatcccgccgcccgggtggtcccgcgaaaactcacccagcacggtcagcctgctgccggccccgaaagtcaggacgttggcccgtcgaccgccaatatcggtacttcactgctggcacacaagtacacagatgtctgggagggagcagccgacaccagcctgagtgggaaatcctctgtgtttaatctagagacattgtagccattggggacttctttgtcagtagtaccagcagcagctgagtagtaaatcagtctcagccccatgcctgggtcttgtcgataccaggacatgtatccatggttcatatcctgggcacactgcagtgtcatgctctgtcctgtcttcaggatgtggaattttggggtctgagtgacaccagcattcacgggacctgcagagaagaaccgccaatatcggtactctgagcgggctggcaaggc

SEQ ID NO: 299 - DNA, 495 bp, Artificial Sequence
  source: /note="Description of Artificial Sequence: Synthetic polynucleotide"
gcctccctcgcgccatcagtcaagccttcggtactccaccctccgactccggggaccgaggggctggaaggtggggagacgcccgaatctcacctgtgaccgtgagcctggtgcccggcccgaagtactgctcgtgtcgactcaagccttcggtacttcactgctggcacacaagtacacagatgtctgggagggagcagccgacaccagcctgagtgggaaatcctctgtgtttaatctagagacattgtagccattggggacttctttgtcagtagtaccagcagcagctgagtagtaaatcagtctcagccccatgcctgggtcttgtcgataccaggacatgtatccatggttcatatcctgggcacactgcagtgtcatgctctgtcctgtcttcaggatgtggaattttggggtctgagtgacaccagcattcacgggacctgcagagaagaactcaagccttcggtactctgagcgggctggcaaggc

SEQ ID NO: 300 - DNA, 495 bp, Artificial Sequence
  source: /note="Description of Artificial Sequence: Synthetic polynucleotide"
gcctccctcgcgccatcagagagtgtcccatggatctgtggacccacttttccctgtgacggatctgcaaaagaacctgaaaaatgtcttacctacaactgtgagtctggtgccttgtccaaagaaagcttcagtgtcgacagagtgtcccatggattcactgctggcacagaagtatacagatgtctgggagggagcagctgactccagcctgagcgggaaatcctctgtgtttgatctggatacattgtagccatcggggacttctcctttgtcagtgataccagcagcaactgagtaatgaatgcgcctcagccccatgcctgggtcttgtcgataccaggacaagtatccatggttcatatcctgggcacactgcagtgtcatgctctgtcctgtcttcaggatgtggaattttggggtctgagtgacaccagcattcactggacctgcagagaagagagtgtcccatggatctgagcgggctggcaaggc

SEQ ID NO: 301 - DNA, 495 bp, Artificial Sequence
  source: /note="Description of Artificial Sequence: Synthetic polynucleotide"
gcctccctcgcgccatcaggttccgaaccatggatatttcccaggacagagtcctccctcatcgcacccctcctagagacccccagccttacctacaacggttaacctggtccccgaaccgaaggtgtagccatagtcgacgttccgaaccatggattcactgctggcacagaagtatacagatgtctgggagggagcagctgactccagcctgagcgggaaatcctctgtgtttgatctggatacattgtagccatcggggacttctcctttgtcagtgataccagcagcaactgagtaatgaatgcgcctcagccccatgcctgggtcttgtcgataccaggacaagtatccatggttcatatcctgggcacactgcagtgtcatgctctgtcctgtcttcaggatgtggaattttggggtctgagtgacaccagcattcactggacctgcagagaaggttccgaaccatggatctgagcgggctggcaaggc

SEQ ID NO: 302 - DNA, 495 bp, Artificial Sequence
  source: /note="Description of Artificial Sequence: Synthetic polynucleotide"
gcctccctcgcgccatcagcgttacttccatggatctggattccagcccctttttgcaagttcccagctgtccagccttgacttactcacctacaacagtgagccaacttccctctccaaaatatatggtgtttcgtcgaccgttacttccatggattcactgctggcacagaagtatacagatgtctgggagggagcagctgactccagcctgagcgggaaatcctctgtgtttgatctggatacattgtagccatcggggacttctcctttgtcagtgataccagcagcaactgagtaatgaatgcgcctcagccccatgcctgggtcttgtcgataccaggacaagtatccatggttcatatcctgggcacactgcagtgtcatgctctgtcctgtcttcaggatgtggaattttggggtctgagtgacaccagcattcactggacctgcagagaagcgttacttccatggatctgagcgggctggcaaggc

SEQ ID NO: 303 - DNA, 495 bp, Artificial Sequence
  source: /note="Description of Artificial Sequence: Synthetic polynucleotide"
gcctccctcgcgccatcagtaggagacccatggatctcctggaactccgaccttatgatacactatcccgaaagaagtcttttacatacccaagacagagagctgggttccactgccaaaaaacagtttttcattgtcgactaggagacccatggattcactgctggcacagaagtatacagatgtctgggagggagcagctgactccagcctgagcgggaaatcctctgtgtttgatctggatacattgtagccatcggggacttctcctttgtcagtgataccagcagcaactgagtaatgaatgcgcctcagccccatgcctgggtcttgtcgataccaggacaagtatccatggttcatatcctgggcacactgcagtgtcatgctctgtcctgtcttcaggatgtggaattttggggtctgagtgacaccagcattcactggacctgcagagaagtaggagacccatggatctgagcgggctggcaaggc

SEQ ID NO: 304 - DNA, 495 bp, Artificial Sequence
  source: /note="Description of Artificial Sequence: Synthetic polynucleotide"
gcctccctcgcgccatcaggacactctccatggatagagaactctgccttcaagggacaatggccataccaccctgattctgcaacttacctaggatggagagtcgagtcccatcaccaaaatgctggggctgatgtcgacgacactctccatggattcactgctggcacagaagtatacagatgtctgggagggagcagctgactccagcctgagcgggaaatcctctgtgtttgatctggatacattgtagccatcggggacttctcctttgtcagtgataccagcagcaactgagtaatgaatgcgcctcagccccatgcctgggtcttgtcgataccaggacaagtatccatggttcatatcctgggcacactgcagtgtcatgctctgtcctgtcttcaggatgtggaattttggggtctgagtgacaccagcattcactggacctgcagagaaggacactctccatggatctgagcgggctggcaaggc

SEQ ID NO: 305 - DNA, 495 bp, Artificial Sequence
  source: /note="Description of Artificial Sequence: Synthetic polynucleotide"
gcctccctcgcgccatcagttcggaacccatggatatcattgcagtcaaacccaggcacccccgagtcaagagtggagcccccatacctgtcacagtgagcctggtcccgttcccaaagtggaggggtgaattatgtcgacttcggaacccatggattcactgctggcacagaagtatacagatgtctgggagggagcagctgactccagcctgagcgggaaatcctctgtgtttgatctggatacattgtagccatcggggacttctcctttgtcagtgataccagcagcaactgagtaatgaatgcgcctcagccccatgcctgggtcttgtcgataccaggacaagtatccatggttcatatcctgggcacactgcagtgtcatgctctgtcctgtcttcaggatgtggaattttggggtctgagtgacaccagcattcactggacctgcagagaagttcggaacccatggatctgagcgggctggcaaggc

SEQ ID NO: 306 - DNA, 495 bp, Artificial Sequence
  source: /note="Description of Artificial Sequence: Synthetic polynucleotide"
gcctccctcgcgccatcagaagtaacgccatggatgggtcgtgcaggctgggctgctcaccctctctcccacctggagcccccttcttacctagcacggtgagccgtgtccctggcccgaagaactgctcattgtgtcgacaagtaacgccatggattcactgctggcacagaagtatacagatgtctgggagggagcagctgactccagcctgagcgggaaatcctctgtgtttgatctggatacattgtagccatcggggacttctcctttgtcagtgataccagcagcaactgagtaatgaatgcgcctcagccccatgcctgggtcttgtcgataccaggacaagtatccatggttcatatcctgggcacactgcagtgtcatgctctgtcctgtcttcaggatgtggaattttggggtctgagtgacaccagcattcactggacctgcagagaagaagtaacgccatggatctgagcgggctggcaaggc

SEQ ID NO: 307 - DNA, 495 bp, Artificial Sequence
  source: /note="Description of Artificial Sequence: Synthetic polynucleotide"
gcctccctcgcgccatcaggtctcctaccatggatcctctgcccatcccgccctctcggagctctccggagccccaaccgcctccttacccagtacggtcagcctagagccttctccaaaaaacagctccccggtgtcgacgtctcctaccatggattcactgctggcacagaagtatacagatgtctgggagggagcagctgactccagcctgagcgggaaatcctctgtgtttgatctggatacattgtagccatcggggacttctcctttgtcagtgataccagcagcaactgagtaatgaatgcgcctcagccccatgcctgggtcttgtcgataccaggacaagtatccatggttcatatcctgggcacactgcagtgtcatgctctgtcctgtcttcaggatgtggaattttggggtctgagtgacaccagcattcactggacctgcagagaaggtctcctaccatggatctgagcgggctggcaaggc

SEQ ID NO: 308 - DNA, 495 bp, Artificial Sequence
  source: /note="Description of Artificial Sequence: Synthetic polynucleotide"
gcctccctcgcgccatcaggtagacacccatggatgcgtcccggggcgccccctccccagttccggggcttcagcgggagcccccgcttaccgagcactgtcagccgggtgcctgggccaaaatactgcgtatctgtcgacgtagacacccatggattcactgctggcacagaagtatacagatgtctgggagggagcagctgactccagcctgagcgggaaatcctctgtgtttgatctggatacattgtagccatcggggacttctcctttgtcagtgataccagcagcaactgagtaatgaatgcgcctcagccccatgcctgggtcttgtcgataccaggacaagtatccatggttcatatcctgggcacactgcagtgtcatgctctgtcctgtcttcaggatgtggaattttggggtctgagtgacaccagcattcactggacctgcagagaaggtagacacccatggatctgagcgggctggcaaggc

SEQ ID NO: 309 - DNA, 495 bp, Artificial Sequence
  source: /note="Description of Artificial Sequence: Synthetic polynucleotide"
gcctccctcgcgccatcagcactgtacccatggatcgcacaaaaacccgagcgcagtctcgtccccggtcccccggcggccccagcttacccagcactgagagccgggtcccggcgccgaagtactgaatgttttgtcgaccactgtacccatggattcactgctggcacagaagtatacagatgtctgggagggagcagctgactccagcctgagcgggaaatcctctgtgtttgatctggatacattgtagccatcggggacttctcctttgtcagtgataccagcagcaactgagtaatgaatgcgcctcagccccatgcctgggtcttgtcgataccaggacaagtatccatggttcatatcctgggcacactgcagtgtcatgctctgtcctgtcttcaggatgtggaattttggggtctgagtgacaccagcattcactggacctgcagagaagcactgtacccatggatctgagcgggctggcaaggc

SEQ ID NO: 310 - DNA, 495 bp, Artificial Sequence
  source: /note="Description of Artificial Sequence: Synthetic polynucleotide"
gcctccctcgcgccatcaggatgatccccatggatccccgcaaaaaccagacccaagccgcccgcgcccgcgccccagcagcccgcgctcaccgagcaccaggagccgcgtgcctggcccgaagtactgggtctcgtcgacgatgatccccatggattcactgctggcacagaagtatacagatgtctgggagggagcagctgactccagcctgagcgggaaatcctctgtgtttgatctggatacattgtagccatcggggacttctcctttgtcagtgataccagcagcaactgagtaatgaatgcgcctcagccccatgcctgggtcttgtcgataccaggacaagtatccatggttcatatcctgggcacactgcagtgtcatgctctgtcctgtcttcaggatgtggaattttggggtctgagtgacaccagcattcactggacctgcagagaaggatgatccccatggatctgagcgggctggcaaggc

SEQ ID NO: 311 - DNA, 495 bp, Artificial Sequence
  source: /note="Description of Artificial Sequence: Synthetic polynucleotide"
gcctccctcgcgccatcagcgccaataccatggatccgccgccttccacctgaatcccgccgcccgggtggtcccgcgaaaactcacccagcacggtcagcctgctgccggccccgaaagtcaggacgttggcccgtcgaccgccaataccatggattcactgctggcacagaagtatacagatgtctgggagggagcagctgactccagcctgagcgggaaatcctctgtgtttgatctggatacattgtagccatcggggacttctcctttgtcagtgataccagcagcaactgagtaatgaatgcgcctcagccccatgcctgggtcttgtcgataccaggacaagtatccatggttcatatcctgggcacactgcagtgtcatgctctgtcctgtcttcaggatgtggaattttggggtctgagtgacaccagcattcactggacctgcagagaagcgccaataccatggatctgagcgggctggcaaggc

SEQ ID NO: 312 - DNA, 495 bp, Artificial Sequence
  source: /note="Description of Artificial Sequence: Synthetic polynucleotide"
gcctccctcgcgccatcagtcaagcctccatggatccaccctccgactccggggaccgaggggctggaaggtggggagacgcccgaatctcacctgtgaccgtgagcctggtgcccggcccgaagtactgctcgtgtcgactcaagcctccatggattcactgctggcacagaagtatacagatgtctgggagggagcagctgactccagcctgagcgggaaatcctctgtgtttgatctggatacattgtagccatcggggacttctcctttgtcagtgataccagcagcaactgagtaatgaatgcgcctcagccccatgcctgggtcttgtcgataccaggacaagtatccatggttcatatcctgggcacactgcagtgtcatgctctgtcctgtcttcaggatgtggaattttggggtctgagtgacaccagcattcactggacctgcagagaagtcaagcctccatggatctgagcgggctggcaaggc

SEQ ID NO: 313 - DNA, 495 bp, Artificial Sequence
  source: /note="Description of Artificial Sequence: Synthetic polynucleotide"
gcctccctcgcgccatcagagagtgtcactgctacctgtggacccacttttccctgtgacggatctgcaaaagaacctgaaaaatgtcttacctacaactgtgagtctggtgccttgtccaaagaaagcttcagtgtcgacagagtgtcactgctactcactgctggcacagagatacacagccaagtccccctgctgtgtgcgctggaacttcagagtggagatggatccctcagacctctgtgcagagaaccgatcacggggaagccccgatttgtctgctgcatccttgccttggaagtaaattggaaactccaggccctgccccaggctctgtcggtaccaataaagggcattatgacctgaaattggatcatatctgagagctacatcctttcccttctttgctaccttgtgtctcagggactgggagactccagcacctgtgtgatctgtggagagagtgtcactgctacctgagcgggctggcaaggc

SEQ ID NO: 314 - DNA, 495 bp, Artificial Sequence
  source: /note="Description of Artificial Sequence: Synthetic polynucleotide"
gcctccctcgcgccatcaggttccgaaactgctacatttcccaggacagagtcctccctcatcgcacccctcctagagacccccagccttacctacaacggttaacctggtccccgaaccgaaggtgtagccatagtcgacgttccgaaactgctactcactgctggcacagagatacacagccaagtccccctgctgtgtgcgctggaacttcagagtggagatggatccctcagacctctgtgcagagaaccgatcacggggaagccccgatttgtctgctgcatccttgccttggaagtaaattggaaactccaggccctgccccaggctctgtcggtaccaataaagggcattatgacctgaaattggatcatatctgagagctacatcctttcccttctttgctaccttgtgtctcagggactgggagactccagcacctgtgtgatctgtggaggttccgaaactgctacctgagcgggctggcaaggc

SEQ ID NO: 315 - DNA, 495 bp, Artificial Sequence
  source: /note="Description of Artificial Sequence: Synthetic polynucleotide"
gcctccctcgcgccatcagcgttacttactgctacctggattccagcccctttttgcaagttcccagctgtccagccttgacttactcacctacaacagtgagccaacttccctctccaaaatatatggtgtttcgtcgaccgttacttactgctactcactgctggcacagagatacacagccaagtccccctgctgtgtgcgctggaacttcagagtggagatggatccctcagacctctgtgcagagaaccgatcacggggaagccccgatttgtctgctgcatccttgccttggaagtaaattggaaactccaggccctgccccaggctctgtcggtaccaataaagggcattatgacctgaaattggatcatatctgagagctacatcctttcccttctttgctaccttgtgtctcagggactgggagactccagcacctgtgtgatctgtggagcgttacttactgctacctgagcgggctggcaaggc

SEQ ID NO: 316 - DNA, 495 bp, Artificial Sequence
  source: /note="Description of Artificial Sequence: Synthetic polynucleotide"
gcctccctcgcgccatcagtaggagacactgctacctcctggaactccgaccttatgatacactatcccgaaagaagtcttttacatacccaagacagagagctgggttccactgccaaaaaacagtttttcattgtcgactaggagacactgctactcactgctggcacagagatacacagccaagtccccctgctgtgtgcgctggaacttcagagtggagatggatccctcagacctctgtgcagagaaccgatcacggggaagccccgatttgtctgctgcatccttgccttggaagtaaattggaaactccaggccctgccccaggctctgtcggtaccaataaagggcattatgacctgaaattggatcatatctgagagctacatcctttcccttctttgctaccttgtgtctcagggactgggagactccagcacctgtgtgatctgtggagtaggagacactgctacctgagcgggctggcaaggc

SEQ ID NO: 317 - DNA, 495 bp, Artificial Sequence
  source: /note="Description of Artificial Sequence: Synthetic polynucleotide"
gcctccctcgcgccatcaggacactctactgctacagagaactctgccttcaagggacaatggccataccaccctgattctgcaacttacctaggatggagagtcgagtcccatcaccaaaatgctggggctgatgtcgacgacactctactgctactcactgctggcacagagatacacagccaagtccccctgctgtgtgcgctggaacttcagagtggagatggatccctcagacctctgtgcagagaaccgatcacggggaagccccgatttgtctgctgcatccttgccttggaagtaaattggaaactccaggccctgccccaggctctgtcggtaccaataaagggcattatgacctgaaattggatcatatctgagagctacatcctttcccttctttgctaccttgtgtctcagggactgggagactccagcacctgtgtgatctgtggaggacactctactgctacctgagcgggctggcaaggc

SEQ ID NO: 318 - DNA, 495 bp, Artificial Sequence
  source: /note="Description of Artificial Sequence: Synthetic polynucleotide"
gcctccctcgcgccatcagttcggaacactgctacatcattgcagtcaaacccaggcacccccgagtcaagagtggagcccccatacctgtcacagtgagcctggtcccgttcccaaagtggaggggtgaattatgtcgacttcggaacactgctactcactgctggcacagagatacacagccaagtccccctgctgtgtgcgctggaacttcagagtggagatggatccctcagacctctgtgcagagaaccgatcacggggaagccccgatttgtctgctgcatccttgccttggaagtaaattggaaactccaggccctgccccaggctctgtcggtaccaataaagggcattatgacctgaaattggatcatatctgagagctacatcctttcccttctttgctaccttgtgtctcagggactgggagactccagcacctgtgtgatctgtggagttcggaacactgctacctgagcgggctggcaaggc

SEQ ID NO: 319 - DNA, 495 bp, Artificial Sequence
  source: /note="Description of Artificial Sequence: Synthetic polynucleotide"
gcctccctcgcgccatcagaagtaacgactgctacgggtcgtgcaggctgggctgctcaccctctctcccacctggagcccccttcttacctagcacggtgagccgtgtccctggcccgaagaactgctcattgtgtcgacaagtaacgactgctactcactgctggcacagagatacacagccaagtccccctgctgtgtgcgctggaacttcagagtggagatggatccctcagacctctgtgcagagaaccgatcacggggaagccccgatttgtctgctgcatccttgccttggaagtaaattggaaactccaggccctgccccaggctctgtcggtaccaataaagggcattatgacctgaaattggatcatatctgagagctacatcctttcccttctttgctaccttgtgtctcagggactgggagactccagcacctgtgtgatctgtggagaagtaacgactgctacctgagcgggctggcaaggc

SEQ ID NO: 320 - DNA, 495 bp, Artificial Sequence
  source: /note="Description of Artificial Sequence: Synthetic polynucleotide"
gcctccctcgcgccatcaggtctcctaactgctaccctctgcccatcccgccctctcggagctctccggagccccaaccgcctccttacccagtacggtcagcctagagccttctccaaaaaacagctccccggtgtcgacgtctcctaactgctactcactgctggcacagagatacacagccaagtccccctgctgtgtgcgctggaacttcagagtggagatggatccctcagacctctgtgcagagaaccgatcacggggaagccccgatttgtctgctgcatccttgccttggaagtaaattggaaactccaggccctgccccaggctctgtcggtaccaataaagggcattatgacctgaaattggatcatatctgagagctacatcctttcccttctttgctaccttgtgtctcagggactgggagactccagcacctgtgtgatctgtggaggtctcctaactgctacctgagcgggctggcaaggc

SEQ ID NO: 321 - DNA, 495 bp, Artificial Sequence
  source: /note="Description of Artificial Sequence: Synthetic polynucleotide"
gcctccctcgcgccatcaggtagacacactgctacgcgtcccggggcgccccctccccagttccggggcttcagcgggagcccccgcttaccgagcactgtcagccgggtgcctgggccaaaatactgcgtatctgtcgacgtagacacactgctactcactgctggcacagagatacacagccaagtccccctgctgtgtgcgctggaacttcagagtggagatggatccctcagacctctgtgcagagaaccgatcacggggaagccccgatttgtctgctgcatccttgccttggaagtaaattggaaactccaggccctgccccaggctctgtcggtaccaataaagggcattatgacctgaaattggatcatatctgagagctacatcctttcccttctttgctaccttgtgtctcagggactgggagactccagcacctgtgtgatctgtggaggtagacacactgctacctgagcgggctggcaaggc

SEQ ID NO: 322 - DNA, 495 bp, Artificial Sequence
  source: /note="Description of Artificial Sequence: Synthetic polynucleotide"
gcctccctcgcgccatcagcactgtacactgctaccgcacaaaaacccgagcgcagtctcgtccccggtcccccggcggccccagcttacccagcactgagagccgggtcccggcgccgaagtactgaatgttttgtcgaccactgtacactgctactcactgctggcacagagatacacagccaagtccccctgctgtgtgcgctggaacttcagagtggagatggatccctcagacctctgtgcagagaaccgatcacggggaagccccgatttgtctgctgcatccttgccttggaagtaaattggaaactccaggccctgccccaggctctgtcggtaccaataaagggcattatgacctgaaattggatcatatctgagagctacatcctttcccttctttgctaccttgtgtctcagggactgggagactccagcacctgtgtgatctgtggagcactgtacactgctacctgagcgggctggcaaggc

SEQ ID NO: 323 - DNA, 495 bp, Artificial Sequence
  source: /note="Description of Artificial Sequence: Synthetic polynucleotide"
gcctccctcgcgccatcaggatgatccactgctacccccgcaaaaaccagacccaagccgcccgcgcccgcgccccagcagcccgcgctcaccgagcaccaggagccgcgtgcctggcccgaagtactgggtctcgtcgacgatgatccactgctactcactgctggcacagagatacacagccaagtccccctgctgtgtgcgctggaacttcagagtggagatggatccctcagacctctgtgcagagaaccgatcacggggaagccccgatttgtctgctgcatccttgccttggaagtaaattggaaactccaggccctgccccaggctctgtcggtaccaataaagggcattatgacctgaaattggatcatatctgagagctacatcctttcccttctttgctaccttgtgtctcagggactgggagactccagcacctgtgtgatctgtggaggatgatccactgctacctgagcgggctggcaaggc

SEQ ID NO: 324 - DNA, 495 bp, Artificial Sequence
  source: /note="Description of Artificial Sequence: Synthetic polynucleotide"
gcctccctcgcgccatcagcgccaataactgctacccgccgccttccacctgaatcccgccgcccgggtggtcccgcgaaaactcacccagcacggtcagcctgctgccggccccgaaagtcaggacgttggcccgtcgaccgccaataactgctactcactgctggcacagagatacacagccaagtccccctgctgtgtgcgctggaacttcagagtggagatggatccctcagacctctgtgcagagaaccgatcacggggaagccccgatttgtctgctgcatccttgccttggaagtaaattggaaactccaggccctgccccaggctctgtcggtaccaataaagggcattatgacctgaaattggatcatatctgagagctacatcctttcccttctttgctaccttgtgtctcagggactgggagactccagcacctgtgtgatctgtggagcgccaataactgctacctgagcgggctggcaaggc

SEQ ID NO: 325 - DNA, 495 bp, Artificial Sequence
  source: /note="Description of Artificial Sequence: Synthetic polynucleotide"
gcctccctcgcgccatcagtcaagcctactgctacccaccctccgactccggggaccgaggggctggaaggtggggagacgcccgaatctcacctgtgaccgtgagcctggtgcccggcccgaagtactgctcgtgtcgactcaagcctactgctactcactgctggcacagagatacacagccaagtccccctgctgtgtgcgctggaacttcagagtggagatggatccctcagacctctgtgcagagaaccgatcacggggaagccccgatttgtctgctgcatccttgccttggaagtaaattggaaactccaggccctgccccaggctctgtcggtaccaataaagggcattatgacctgaaattggatcatatctgagagctacatcctttcccttctttgctaccttgtgtctcagggactgggagactccagcacctgtgtgatctgtggagtcaagcctactgctacctgagcgggctggcaaggc

SEQ ID NO: 326 - DNA, 495 bp, Artificial Sequence
  source: /note="Description of Artificial Sequence: Synthetic polynucleotide"
gcctccctcgcgccatcagagagtgtcacgaagatctgtggacccacttttccctgtgacggatctgcaaaagaacctgaaaaatgtcttacctacaactgtgagtctggtgccttgtccaaagaaagcttcagtgtcgacagagtgtcacgaagattcactgctggcacagagatacacggccgagtcctcctgctgtgtgcgctggatcgtcagagtggagacggatcccccagtcctctctgcagagaagcgatcactgggcagccctgatttgtctggtgcactgttgccttggaagtaaattaaaaactccaggccctgccccaggctctgtcggtaccagtaaagggcagtatgacctgaaattggatcacacctgagctctacatcctttcccttctctgtgaccttgttactgggggactgggagactccagctcctgtgtgatctgtggagagagtgtcacgaagatctgagcgggctggcaaggc

SEQ ID NO: 327 - DNA, 495 bp, Artificial Sequence
  source: /note="Description of Artificial Sequence: Synthetic polynucleotide"
gcctccctcgcgccatcaggttccgaaacgaagatatttcccaggacagagtcctccctcatcgcacccctcctagagacccccagccttacctacaacggttaacctggtccccgaaccgaaggtgtagccatagtcgacgttccgaaacgaagattcactgctggcacagagatacacggccgagtcctcctgctgtgtgcgctggatcgtcagagtggagacggatcccccagtcctctctgcagagaagcgatcactgggcagccctgatttgtctggtgcactgttgccttggaagtaaattaaaaactccaggccctgccccaggctctgtcggtaccagtaaagggcagtatgacctgaaattggatcacacctgagctctacatcctttcccttctctgtgaccttgttactgggggactgggagactccagctcctgtgtgatctgtggaggttccgaaacgaagatctgagcgggctggcaaggc

SEQ ID NO: 328 - DNA, 495 bp, Artificial Sequence
  source: /note="Description of Artificial Sequence: Synthetic polynucleotide"
gcctccctcgcgccatcagcgttacttacgaagatctggattccagcccctttttgcaagttcccagctgtccagccttgacttactcacctacaacagtgagccaacttccctctccaaaatatatggtgtttcgtcgaccgttacttacgaagattcactgctggcacagagatacacggccgagtcctcctgctgtgtgcgctggatcgtcagagtggagacggatcccccagtcctctctgcagagaagcgatcactgggcagccctgatttgtctggtgcactgttgccttggaagtaaattaaaaactccaggccctgccccaggctctgtcggtaccagtaaagggcagtatgacctgaaattggatcacacctgagctctacatcctttcccttctctgtgaccttgttactgggggactgggagactccagctcctgtgtgatctgtggagcgttacttacgaagatctgagcgggctggcaaggc

SEQ ID NO: 329 - DNA, 495 bp, Artificial Sequence
  source: /note="Description of Artificial Sequence: Synthetic polynucleotide"
gcctccctcgcgccatcagtaggagacacgaagatctcctggaactccgaccttatgatacactatcccgaaagaagtcttttacatacccaagacagagagctgggttccactgccaaaaaacagtttttcattgtcgactaggagacacgaagattcactgctggcacagagatacacggccgagtcctcctgctgtgtgcgctggatcgtcagagtggagacggatcccccagtcctctctgcagagaagcgatcactgggcagccctgatttgtctggtgcactgttgccttggaagtaaattaaaaactccaggccctgccccaggctctgtcggtaccagtaaagggcagtatgacctgaaattggatcacacctgagctctacatcctttcccttctctgtgaccttgttactgggggactgggagactccagctcctgtgtgatctgtggagtaggagacacgaagatctgagcgggctggcaaggc

SEQ ID NO: 330 - DNA, 495 bp, Artificial Sequence
  source: /note="Description of Artificial Sequence: Synthetic polynucleotide"
gcctccctcgcgccatcaggacactctacgaagatagagaactctgccttcaagggacaatggccataccaccctgattctgcaacttacctaggatggagagtcgagtcccatcaccaaaatgctggggctgatgtcgacgacactctacgaagattcactgctggcacagagatacacggccgagtcctcctgctgtgtgcgctggatcgtcagagtggagacggatcccccagtcctctctgcagagaagcgatcactgggcagccctgatttgtctggtgcactgttgccttggaagtaaattaaaaactccaggccctgccccaggctctgtcggtaccagtaaagggcagtatgacctgaaattggatcacacctgagctctacatcctttcccttctctgtgaccttgttactgggggactgggagactccagctcctgtgtgatctgtggaggacactctacgaagatctgagcgggctggcaaggc

SEQ ID NO: 331 - DNA, 495 bp, Artificial Sequence
  source: /note="Description of Artificial Sequence: Synthetic polynucleotide"
gcctccctcgcgccatcagttcggaacacgaagatatcattgcagtcaaacccaggcacccccgagtcaagagtggagcccccatacctgtcacagtgagcctggtcccgttcccaaagtggaggggtgaattatgtcgacttcggaacacgaagattcactgctggcacagagatacacggccgagtcctcctgctgtgtgcgctggatcgtcagagtggagacggatcccccagtcctctctgcagagaagcgatcactgggcagccctgatttgtctggtgcactgttgccttggaagtaaattaaaaactccaggccctgccccaggctctgtcggtaccagtaaagggcagtatgacctgaaattggatcacacctgagctctacatcctttcccttctctgtgaccttgttactgggggactgggagactccagctcctgtgtgatctgtggagttcggaacacgaagatctgagcgggctggcaaggc

SEQ ID NO: 332 - DNA, 495 bp, Artificial Sequence
  source: /note="Description of Artificial Sequence: Synthetic polynucleotide"
gcctccctcgcgccatcagaagtaacgacgaagatgggtcgtgcaggctgggctgctcaccctctctcccacctggagcccccttcttacctagcacggtgagccgtgtccctggcccgaagaactgctcattgtgtcgacaagtaacgacgaagattcactgctggcacagagatacacggccgagtcctcctgctgtgtgcgctggatcgtcagagtggagacggatcccccagtcctctctgcagagaagcgatcactgggcagccctgatttgtctggtgcactgttgccttggaagtaaattaaaaactccaggccctgccccaggctctgtcggtaccagtaaagggcagtatgacctgaaattggatcacacctgagctctacatcctttcccttctctgtgaccttgttactgggggactgggagactccagctcctgtgtgatctgtggagaagtaacgacgaagatctgagcgggctggcaaggc

SEQ ID NO: 333 - DNA, 495 bp, Artificial Sequence
  source: /note="Description of Artificial Sequence: Synthetic polynucleotide"
gcctccctcgcgccatcaggtctcctaacgaagatcctctgcccatcccgccctctcggagctctccggagccccaaccgcctccttacccagtacggtcagcctagagccttctccaaaaaacagctccccggtgtcgacgtctcctaacgaagattcactgctggcacagagatacacggccgagtcctcctgctgtgtgcgctggatcgtcagagtggagacggatcccccagtcctctctgcagagaagcgatcactgggcagccctgatttgtctggtgcactgttgccttggaagtaaattaaaaactccaggccctgccccaggctctgtcggtaccagtaaagggcagtatgacctgaaattggatcacacctgagctctacatcctttcccttctctgtgaccttgttactgggggactgggagactccagctcctgtgtgatctgtggaggtctcctaacgaagatctgagcgggctggcaaggc

SEQ ID NO: 334 - DNA, 495 bp, Artificial Sequence
  source: /note="Description of Artificial Sequence: Synthetic polynucleotide"
gcctccctcgcgccatcaggtagacacacgaagatgcgtcccggggcgccccctccccagttccggggcttcagcgggagcccccgcttaccgagcactgtcagccgggtgcctgggccaaaatactgcgtatctgtcgacgtagacacacgaagattcactgctggcacagagatacacggccgagtcctcctgctgtgtgcgctggatcgtcagagtggagacggatcccccagtcctctctgcagagaagcgatcactgggcagccctgatttgtctggtgcactgttgccttggaagtaaattaaaaactccaggccctgccccaggctctgtcggtaccagtaaagggcagtatgacctgaaattggatcacacctgagctctacatcctttcccttctctgtgaccttgttactgggggactgggagactccagctcctgtgtgatctgtggaggtagacacacgaagatctgagcgggctggcaaggc

SEQ ID NO: 335 - DNA, 495 bp, Artificial Sequence
  source: /note="Description of Artificial Sequence: Synthetic polynucleotide"
gcctccctcgcgccatcagcactgtacacgaagatcgcacaaaaacccgagcgcagtctcgtccccggtcccccggcggccccagcttacccagcactgagagccgggtcccggcgccgaagtactgaatgttttgtcgaccactgtacacgaagattcactgctggcacagagatacacggccgagtcctcctgctgtgtgcgctggatcgtcagagtggagacggatcccccagtcctctctgcagagaagcgatcactgggcagccctgatttgtctggtgcactgttgccttggaagtaaattaaaaactccaggccctgccccaggctctgtcggtaccagtaaagggcagtatgacctgaaattggatcacacctgagctctacatcctttcccttctctgtgaccttgttactgggggactgggagactccagctcctgtgtgatctgtggagcactgtacacgaagatctgagcgggctggcaaggc

SEQ ID NO: 336 - DNA, 495 bp, Artificial Sequence
  source: /note="Description of Artificial Sequence: Synthetic polynucleotide"
gcctccctcgcgccatcaggatgatccacgaagatccccgcaaaaaccagacccaagccgcccgcgcccgcgccccagcagcccgcgctcaccgagcaccaggagccgcgtgcctggcccgaagtactgggtctcgtcgacgatgatccacgaagattcactgctggcacagagatacacggccgagtcctcctgctgtgtgcgctggatcgtcagagtggagacggatcccccagtcctctctgcagagaagcgatcactgggcagccctgatttgtctggtgcactgttgccttggaagtaaattaaaaactccaggccctgccccaggctctgtcggtaccagtaaagggcagtatgacctgaaattggatcacacctgagctctacatcctttcccttctctgtgaccttgttactgggggactgggagactccagctcctgtgtgatctgtggaggatgatccacgaagatctgagcgggctggcaaggc

SEQ ID NO: 337 - DNA, 495 bp, Artificial Sequence
  source: /note="Description of Artificial Sequence: Synthetic polynucleotide"
gcctccctcgcgccatcagcgccaataacgaagatccgccgccttccacctgaatcccgccgcccgggtggtcccgcgaaaactcacccagcacggtcagcctgctgccggccccgaaagtcaggacgttggcccgtcgaccgccaataacgaagattcactgctggcacagagatacacggccgagtcctcctgctgtgtgcgctggatcgtcagagtggagacggatcccccagtcctctctgcagagaagcgatcactgggcagccctgatttgtctggtgcactgttgccttggaagtaaattaaaaactccaggccctgccccaggctctgtcggtaccagtaaagggcagtatgacctgaaattggatcacacctgagctctacatcctttcccttctctgtgaccttgttactgggggactgggagactccagctcctgtgtgatctgtggagcgccaataacgaagatctgagcgggctggcaaggc

SEQ ID NO: 338 - DNA, 495 bp, Artificial Sequence
  source: /note="Description of Artificial Sequence: Synthetic polynucleotide"
gcctccctcgcgccatcagtcaagcctacgaagatccaccctccgactccggggaccgaggggctggaaggtggggagacgcccgaatctcacctgtgaccgtgagcctggtgcccggcccgaagtactgctcgtgtcgactcaagcctacgaagattcactgctggcacagagatacacggccgagtcctcctgctgtgtgcgctggatcgtcagagtggagacggatcccccagtcctctctgcagagaagcgatcactgggcagccctgatttgtctggtgcactgttgccttggaagtaaattaaaaactccaggccctgccccaggctctgtcggtaccagtaaagggcagtatgacctgaaattggatcacacctgagctctacatcctttcccttctctgtgaccttgttactgggggactgggagactccagctcctgtgtgatctgtggagtcaagcctacgaagatctgagcgggctggcaaggc

SEQ ID NO: 339 - DNA, 495 bp, Artificial Sequence
  source: /note="Description of Artificial Sequence: Synthetic polynucleotide"
gcctccctcgcgccatcagagagtgtcactgtggactgtggacccacttttccctgtgacggatctgcaaaagaacctgaaaaatgtcttacctacaactgtgagtctggtgccttgtccaaagaaagcttcagtgtcgacagagtgtcactgtggatcactgctggcacagagatacacggctgagtccccccgctctgtgcgctggatcttcagagtagagacggatccctcaggcctgactgcaaagaaccgatcgttgggcagccctgagtcatctgccgcacccgtgccttggaagtaaattagaaactctgggccctgccccaggctttgtcggtaccagtaaagggcagtatgacctgaaattggatcacacctgagctctacatattttcccttctctgtgaccttgttactgggggtctgggagactccagcacctgtgtgatctgcggagagagtgtcactgtggactgagcgggctggcaaggc

SEQ ID NO: 340 - DNA, 495 bp, Artificial Sequence
  source: /note="Description of Artificial Sequence: Synthetic polynucleotide"
gcctccctcgcgccatcaggttccgaaactgtggaatttcccaggacagagtcctccctcatcgcacccctcctagagacccccagccttacctacaacggttaacctggtccccgaaccgaaggtgtagccatagtcgacgttccgaaactgtggatcactgctggcacagagatacacggctgagtccccccgctctgtgcgctggatcttcagagtagagacggatccctcaggcctgactgcaaagaaccgatcgttgggcagccctgagtcatctgccgcacccgtgccttggaagtaaattagaaactctgggccctgccccaggctttgtcggtaccagtaaagggcagtatgacctgaaattggatcacacctgagctctacatattttcccttctctgtgaccttgttactgggggtctgggagactccagcacctgtgtgatctgcggaggttccgaaactgtggactgagcgggctggcaaggc

SEQ ID NO: 341 - DNA, 495 bp, Artificial Sequence
  source: /note="Description of Artificial Sequence: Synthetic polynucleotide"
gcctccctcgcgccatcagcgttacttactgtggactggattccagcccctttttgcaagttcccagctgtccagccttgacttactcacctacaacagtgagccaacttccctctccaaaatatatggtgtttcgtcgaccgttacttactgtggatcactgctggcacagagatacacggctgagtccccccgctctgtgcgctggatcttcagagtagagacggatccctcaggcctgactgcaaagaaccgatcgttgggcagccctgagtcatctgccgcacccgtgccttggaagtaaattagaaactctgggccctgccccaggctttgtcggtaccagtaaagggcagtatgacctgaaattggatcacacctgagctctacatattttcccttctctgtgaccttgttactgggggtctgggagactccagcacctgtgtgatctgcggagcgttacttactgtggactgagcgggctggcaaggc

SEQ ID NO: 342 - DNA, 495 bp, Artificial Sequence
  source: /note="Description of Artificial Sequence: Synthetic polynucleotide"
gcctccctcgcgccatcagtaggagacactgtggactcctggaactccgaccttatgatacactatcccgaaagaagtcttttacatacccaagacagagagctgggttccactgccaaaaaacagtttttcattgtcgactaggagacactgtggatcactgctggcacagagatacacggctgagtccccccgctctgtgcgctggatcttcagagtagagacggatccctcaggcctgactgcaaagaaccgatcgttgggcagccctgagtcatctgccgcacccgtgccttggaagtaaattagaaactctgggccctgccccaggctttgtcggtaccagtaaagggcagtatgacctgaaattggatcacacctgagctctacatattttcccttctctgtgaccttgttactgggggtctgggagactccagcacctgtgtgatctgcggagtaggagacactgtggactgagcgggctggcaaggc

SEQ ID NO: 343 - DNA, 495 bp, Artificial Sequence
  source: /note="Description of Artificial Sequence: Synthetic polynucleotide"
gcctccctcgcgccatcaggacactctactgtggaagagaactctgccttcaagggacaatggccataccaccctgattctgcaacttacctaggatggagagtcgagtcccatcaccaaaatgctggggctgatgtcgacgacactctactgtggatcactgctggcacagagatacacggctgagtccccccgctctgtgcgctggatcttcagagtagagacggatccctcaggcctgactgcaaagaaccgatcgttgggcagccctgagtcatctgccgcacccgtgccttggaagtaaattagaaactctgggccctgccccaggctttgtcggtaccagtaaagggcagtatgacctgaaattggatcacacctgagctctacatattttcccttctctgtgaccttgttactgggggtctgggagactccagcacctgtgtgatctgcggaggacactctactgtggactgagcgggctggcaaggc

SEQ ID NO: 344 - DNA, 495 bp, Artificial Sequence
  source: /note="Description of Artificial Sequence: Synthetic polynucleotide"
gcctccctcgcgccatcagttcggaacactgtggaatcattgcagtcaaacccaggcacccccgagtcaagagtggagcccccatacctgtcacagtgagcctggtcccgttcccaaagtggaggggtgaattatgtcgacttcggaacactgtggatcactgctggcacagagatacacggctgagtccccccgctctgtgcgctggatcttcagagtagagacggatccctcaggcctgactgcaaagaaccgatcgttgggcagccctgagtcatctgccgcacccgtgccttggaagtaaattagaaactctgggccctgccccaggctttgtcggtaccagtaaagggcagtatgacctgaaattggatcacacctgagctctacatattttcccttctctgtgaccttgttactgggggtctgggagactccagcacctgtgtgatctgcggagttcggaacactgtggactgagcgggctggcaaggc

SEQ ID NO: 345 - DNA, 495 bp, Artificial Sequence
  source: /note="Description of Artificial Sequence: Synthetic polynucleotide"
gcctccctcgcgccatcagaagtaacgactgtggagggtcgtgcaggctgggctgctcaccctctctcccacctggagcccccttcttacctagcacggtgagccgtgtccctggcccgaagaactgctcattgtgtcgacaagtaacgactgtggatcactgctggcacagagatacacggctgagtccccccgctctgtgcgctggatcttcagagtagagacggatccctcaggcctgactgcaaagaaccgatcgttgggcagccctgagtcatctgccgcacccgtgccttggaagtaaattagaaactctgggccctgccccaggctttgtcggtaccagtaaagggcagtatgacctgaaattggatcacacctgagctctacatattttcccttctctgtgaccttgttactgggggtctgggagactccagcacctgtgtgatctgcggagaagtaacgactgtggactgagcgggctggcaaggc

SEQ ID NO: 346 - DNA, 495 bp, Artificial Sequence
  source: /note="Description of Artificial Sequence: Synthetic polynucleotide"
gcctccctcgcgccatcaggtctcctaactgtggacctctgcccatcccgccctctcggagctctccggagccccaaccgcctccttacccagtacggtcagcctagagccttctccaaaaaacagctccccggtgtcgacgtctcctaactgtggatcactgctggcacagagatacacggctgagtccccccgctctgtgcgctggatcttcagagtagagacggatccctcaggcctgactgcaaagaaccgatcgttgggcagccctgagtcatctgccgcacccgtgccttggaagtaaattagaaactctgggccctgccccaggctttgtcggtaccagtaaagggcagtatgacctgaaattggatcacacctgagctctacatattttcccttctctgtgaccttgttactgggggtctgggagactccagcacctgtgtgatctgcggaggtctcctaactgtggactgagcgggctggcaaggc

SEQ ID NO: 347 - DNA, 495 bp, Artificial Sequence
  source: /note="Description of Artificial Sequence: Synthetic polynucleotide"
gcctccctcgcgccatcaggtagacacactgtggagcgtcccggggcgccccctccccagttccggggcttcagcgggagcccccgcttaccgagcactgtcagccgggtgcctgggccaaaatactgcgtatctgtcgacgtagacacactgtggatcactgctggcacagagatacacggctgagtccccccgctctgtgcgctggatcttcagagtagagacggatccctcaggcctgactgcaaagaaccgatcgttgggcagccctgagtcatctgccgcacccgtgccttggaagtaaattagaaactctgggccctgccccaggctttgtcggtaccagtaaagggcagtatgacctgaaattggatcacacctgagctctacatattttcccttctctgtgaccttgttactgggggtctgggagactccagcacctgtgtgatctgcggaggtagacacactgtggactgagcgggctggcaaggc

SEQ ID NO: 348 - DNA, 495 bp, Artificial Sequence
  source: /note="Description of Artificial Sequence: Synthetic polynucleotide"
gcctccctcgcgccatcagcactgtacactgtggacgcacaaaaacccgagcgcagtctcgtccccggtcccccggcggccccagcttacccagcactgagagccgggtcccggcgccgaagtactgaatgttttgtcgaccactgtacactgtggatcactgctggcacagagatacacggctgagtccccccgctctgtgcgctggatcttcagagtagagacggatccctcaggcctgactgcaaagaaccgatcgttgggcagccctgagtcatctgccgcacccgtgccttggaagtaaattagaaactctgggccctgccccaggctttgtcggtaccagtaaagggcagtatgacctgaaattggatcacacctgagctctacatattttcccttctctgtgaccttgttactgggggtctgggagactccagcacctgtgtgatctgcggagcactgtacactgtggactgagcgggctggcaaggc

SEQ ID NO: 349 - DNA, 495 bp, Artificial Sequence
  source: /note="Description of Artificial Sequence: Synthetic polynucleotide"
gcctccctcgcgccatcaggatgatccactgtggaccccgcaaaaaccagacccaagccgcccgcgcccgcgccccagcagcccgcgctcaccgagcaccaggagccgcgtgcctggcccgaagtactgggtctcgtcgacgatgatccactgtggatcactgctggcacagagatacacggctgagtccccccgctctgtgcgctggatcttcagagtagagacggatccctcaggcctgactgcaaagaaccgatcgttgggcagccctgagtcatctgccgcacccgtgccttggaagtaaattagaaactctgggccctgccccaggctttgtcggtaccagtaaagggcagtatgacctgaaattggatcacacctgagctctacatattttcccttctctgtgaccttgttactgggggtctgggagactccagcacctgtgtgatctgcggaggatgatccactgtggactgagcgggctggcaaggc

SEQ ID NO: 350 - DNA, 495 bp, Artificial Sequence
  source: /note="Description of Artificial Sequence: Synthetic polynucleotide"
gcctccctcgcgccatcagcgccaataactgtggaccgccgccttccacctgaatcccgccgcccgggtggtcccgcgaaaactcacccagcacggtcagcctgctgccggccccgaaagtcaggacgttggcccgtcgaccgccaataactgtggatcactgctggcacagagatacacggctgagtccccccgctctgtgcgctggatcttcagagtagagacggatccctcaggcctgactgcaaagaaccgatcgttgggcagccctgagtcatctgccgcacccgtgccttggaagtaaattagaaactctgggccctgccccaggctttgtcggtaccagtaaagggcagtatgacctgaaattggatcacacctgagctctacatattttcccttctctgtgaccttgttactgggggtctgggagactccagcacctgtgtgatctgcggagcgccaataactgtggactgagcgggctggcaaggc

SEQ ID NO: 351 - DNA, 495 bp, Artificial Sequence
  source: /note="Description of Artificial Sequence: Synthetic polynucleotide"
gcctccctcgcgccatcagtcaagcctactgtggaccaccctccgactccggggaccgaggggctggaaggtggggagacgcccgaatctcacctgtgaccgtgagcctggtgcccggcccgaagtactgctcgtgtcgactcaagcctactgtggatcactgctggcacagagatacacggctgagtccccccgctctgtgcgctggatcttcagagtagagacggatccctcaggcctgactgcaaagaaccgatcgttgggcagccctgagtcatctgccgcacccgtgccttggaagtaaattagaaactctgggccctgccccaggctttgtcggtaccagtaaagggcagtatgacctgaaattggatcacacctgagctctacatattttcccttctctgtgaccttgttactgggggtctgggagactccagcacctgtgtgatctgcggagtcaagcctactgtggactgagcgggctggcaaggc

SEQ ID NO: 352 - DNA, 495 bp, Artificial Sequence
  source: /note="Description of Artificial Sequence: Synthetic polynucleotide"
gcctccctcgcgccatcagagagtgtcggtgtcatctgtggacccacttttccctgtgacggatctgcaaaagaacctgaaaaatgtcttacctacaactgtgagtctggtgccttgtccaaagaaagcttcagtgtcgacagagtgtcggtgtcattcactgctggcacagagatacacagctgagtccccctgctctgtgcgctggatcttcagagtggagacggatctctcaggcctctctgcagagaaccgaccactgggccgccctgatttgtctcgttgagcatcactctgggagtaagtcagaacctctgagccctgccccagggtctgtcggtaccaataaagggttacatgacccgaaattgaatcacacctgagagctacatcccgtcccctctttgcgactttgtaccttggggactgggagactccagcacctgtgtgatctgtggaaagagtgtcggtgtcatctgagcgggctggcaaggc

SEQ ID NO: 353 - DNA, 495 bp, Artificial Sequence
  source: /note="Description of Artificial Sequence: Synthetic polynucleotide"
gcctccctcgcgccatcaggttccgaaggtgtcatatttcccaggacagagtcctccctcatcgcacccctcctagagacccccagccttacctacaacggttaacctggtccccgaaccgaaggtgtagccatagtcgacgttccgaaggtgtcattcactgctggcacagagatacacagctgagtccccctgctctgtgcgctggatcttcagagtggagacggatctctcaggcctctctgcagagaaccgaccactgggccgccctgatttgtctcgttgagcatcactctgggagtaagtcagaacctctgagccctgccccagggtctgtcggtaccaataaagggttacatgacccgaaattgaatcacacctgagagctacatcccgtcccctctttgcgactttgtaccttggggactgggagactccagcacctgtgtgatctgtggaagttccgaaggtgtcatctgagcgggctggcaaggc

SEQ ID NO: 354 - DNA, 495 bp, Artificial Sequence
  source: /note="Description of Artificial Sequence: Synthetic polynucleotide"
gcctccctcgcgccatcagcgttacttggtgtcatctggattccagcccctttttgcaagttcccagctgtccagccttgacttactcacctacaacagtgagccaacttccctctccaaaatatatggtgtttcgtcgaccgttacttggtgtcattcactgctggcacagagatacacagctgagtccccctgctctgtgcgctggatcttcagagtggagacggatctctcaggcctctctgcagagaaccgaccactgggccgccctgatttgtctcgttgagcatcactctgggagtaagtcagaacctctgagccctgccccagggtctgtcggtaccaataaagggttacatgacccgaaattgaatcacacctgagagctacatcccgtcccctctttgcgactttgtaccttggggactgggagactccagcacctgtgtgatctgtggaacgttacttggtgtcatctgagcgggctggcaaggc

SEQ ID NO: 355 - DNA, 495 bp, Artificial Sequence
  source: /note="Description of Artificial Sequence: Synthetic polynucleotide"
gcctccctcgcgccatcagtaggagacggtgtcatctcctggaactccgaccttatgatacactatcccgaaagaagtcttttacatacccaagacagagagctgggttccactgccaaaaaacagtttttcattgtcgactaggagacggtgtcattcactgctggcacagagatacacagctgagtccccctgctctgtgcgctggatcttcagagtggagacggatctctcaggcctctctgcagagaaccgaccactgggccgccctgatttgtctcgttgagcatcactctgggagtaagtcagaacctctgagccctgccccagggtctgtcggtaccaataaagggttacatgacccgaaattgaatcacacctgagagctacatcccgtcccctctttgcgactttgtaccttggggactgggagactccagcacctgtgtgatctgtggaataggagacggtgtcatctgagcgggctggcaaggc

SEQ ID NO: 356 - DNA, 495 bp, Artificial Sequence
  source: /note="Description of Artificial Sequence: Synthetic polynucleotide"
gcctccctcgcgccatcaggacactctggtgtcatagagaactctgccttcaagggacaatggccataccaccctgattctgcaacttacctaggatggagagtcgagtcccatcaccaaaatgctggggctgatgtcgacgacactctggtgtcattcactgctggcacagagatacacagctgagtccccctgctctgtgcgctggatcttcagagtggagacggatctctcaggcctctctgcagagaaccgaccactgggccgccctgatttgtctcgttgagcatcactctgggagtaagtcagaacctctgagccctgccccagggtctgtcggtaccaataaagggttacatgacccgaaattgaatcacacctgagagctacatcccgtcccctctttgcgactttgtaccttggggactgggagactccagcacctgtgtgatctgtggaagacactctggtgtcatctgagcgggctggcaaggc

SEQ ID NO: 357 - DNA, 495 bp, Artificial Sequence
  source: /note="Description of Artificial Sequence: Synthetic polynucleotide"
gcctccctcgcgccatcagttcggaacggtgtcatatcattgcagtcaaacccaggcacccccgagtcaagagtggagcccccatacctgtcacagtgagcctggtcccgttcccaaagtggaggggtgaattatgtcgacttcggaacggtgtcattcactgctggcacagagatacacagctgagtccccctgctctgtgcgctggatcttcagagtggagacggatctctcaggcctctctgcagagaaccgaccactgggccgccctgatttgtctcgttgagcatcactctgggagtaagtcagaacctctgagccctgccccagggtctgtcggtaccaataaagggttacatgacccgaaattgaatcacacctgagagctacatcccgtcccctctttgcgactttgtaccttggggactgggagactccagcacctgtgtgatctgtggaattcggaacggtgtcatctgagcgggctggcaaggc

SEQ ID NO: 358 - DNA, 495 bp, Artificial Sequence
  source: /note="Description of Artificial Sequence: Synthetic polynucleotide"
gcctccctcgcgccatcagaagtaacgggtgtcatgggtcgtgcaggctgggctgctcaccctctctcccacctggagcccccttcttacctagcacggtgagccgtgtccctggcccgaagaactgctcattgtgtcgacaagtaacgggtgtcattcactgctggcacagagatacacagctgagtccccctgctctgtgcgctggatcttcagagtggagacggatctctcaggcctctctgcagagaaccgaccactgggccgccctgatttgtctcgttgagcatcactctgggagtaagtcagaacctctgagccctgccccagggtctgtcggtaccaataaagggttacatgacccgaaattgaatcacacctgagagctacatcccgtcccctctttgcgactttgtaccttggggactgggagactccagcacctgtgtgatctgtggaaaagtaacgggtgtcatctgagcgggctggcaaggc

SEQ ID NO: 359 - DNA, 495 bp, Artificial Sequence
  source: /note="Description of Artificial Sequence: Synthetic polynucleotide"
gcctccctcgcgccatcaggtctcctaggtgtcatcctctgcccatcccgccctctcggagctctccggagccccaaccgcctccttacccagtacggtcagcctagagccttctccaaaaaacagctccccggtgtcgacgtctcctaggtgtcattcactgctggcacagagatacacagctgagtccccctgctctgtgcgctggatcttcagagtggagacggatctctcaggcctctctgcagagaaccgaccactgggccgccctgatttgtctcgttgagcatcactctgggagtaagtcagaacctctgagccctgccccagggtctgtcggtaccaataaagggttacatgacccgaaattgaatcacacctgagagctacatcccgtcccctctttgcgactttgtaccttggggactgggagactccagcacctgtgtgatctgtggaagtctcctaggtgtcatctgagcgggctggcaaggc

SEQ ID NO: 360 - DNA, 495 bp, Artificial Sequence
  source: /note="Description of Artificial Sequence: Synthetic polynucleotide"
gcctccctcgcgccatcaggtagacacggtgtcatgcgtcccggggcgccccctccccagttccggggcttcagcgggagcccccgcttaccgagcactgtcagccgggtgcctgggccaaaatactgcgtatctgtcgacgtagacacggtgtcattcactgctggcacagagatacacagctgagtccccctgctctgtgcgctggatcttcagagtggagacggatctctcaggcctctctgcagagaaccgaccactgggccgccctgatttgtctcgttgagcatcactctgggagtaagtcagaacctctgagccctgccccagggtctgtcggtaccaataaagggttacatgacccgaaattgaatcacacctgagagctacatcccgtcccctctttgcgactttgtaccttggggactgggagactccagcacctgtgtgatctgtggaagtagacacggtgtcatctgagcgggctggcaaggc

SEQ ID NO: 361 - DNA, 495 bp, Artificial Sequence
  source: /note="Description of Artificial Sequence: Synthetic polynucleotide"
gcctccctcgcgccatcagcactgtacggtgtcatcgcacaaaaacccgagcgcagtctcgtccccggtcccccggcggccccagcttacccagcactgagagccgggtcccggcgccgaagtactgaatgttttgtcgaccactgtacggtgtcattcactgctggcacagagatacacagctgagtccccctgctctgtgcgctggatcttcagagtggagacggatctctcaggcctctctgcagagaaccgaccactgggccgccctgatttgtctcgttgagcatcactctgggagtaagtcagaacctctgagccctgccccagggtctgtcggtaccaataaagggttacatgacccgaaattgaatcacacctgagagctacatcccgtcccctctttgcgactttgtaccttggggactgggagactccagcacctgtgtgatctgtggaacactgtacggtgtcatctgagcgggctggcaaggc

SEQ ID NO: 362 - DNA, 495 bp, Artificial Sequence
  source: /note="Description of Artificial Sequence: Synthetic polynucleotide"
gcctccctcgcgccatcaggatgatccggtgtcatccccgcaaaaaccagacccaagccgcccgcgcccgcgccccagcagcccgcgctcaccgagcaccaggagccgcgtgcctggcccgaagtactgggtctcgtcgacgatgatccggtgtcattcactgctggcacagagatacacagctgagtccccctgctctgtgcgctggatcttcagagtggagacggatctctcaggcctctctgcagagaaccgaccactgggccgccctgatttgtctcgttgagcatcactctgggagtaagtcagaacctctgagccctgccccagggtctgtcggtaccaataaagggttacatgacccgaaattgaatcacacctgagagctacatcccgtcccctctttgcgactttgtaccttggggactgggagactccagcacctgtgtgatctgtggaagatgatccggtgtcatctgagcgggctggcaaggc

SEQ ID NO: 363 - DNA, 495 bp, Artificial Sequence
  source: /note="Description of Artificial Sequence: Synthetic polynucleotide"
gcctccctcgcgccatcagcgccaataggtgtcatccgccgccttccacctgaatcccgccgcccgggtggtcccgcgaaaactcacccagcacggtcagcctgctgccggccccgaaagtcaggacgttggcccgtcgaccgccaataggtgtcattcactgctggcacagagatacacagctgagtccccctgctctgtgcgctggatcttcagagtggagacggatctctcaggcctctctgcagagaaccgaccactgggccgccctgatttgtctcgttgagcatcactctgggagtaagtcagaacctctgagccctgccccagggtctgtcggtaccaataaagggttacatgacccgaaattgaatcacacctgagagctacatcccgtcccctctttgcgactttgtaccttggggactgggagactccagcacctgtgtgatctgtggaacgccaataggtgtcatctgagcgggctggcaaggc

SEQ ID NO: 364 - DNA, 495 bp, Artificial Sequence
  source: /note="Description of Artificial Sequence: Synthetic polynucleotide"
gcctccctcgcgccatcagtcaagcctggtgtcatccaccctccgactccggggaccgaggggctggaaggtggggagacgcccgaatctcacctgtgaccgtgagcctggtgcccggcccgaagtactgctcgtgtcgactcaagcctggtgtcattcactgctggcacagagatacacagctgagtccccctgctctgtgcgctggatcttcagagtggagacggatctctcaggcctctctgcagagaaccgaccactgggccgccctgatttgtctcgttgagcatcactctgggagtaagtcagaacctctgagccctgccccagggtctgtcggtaccaataaagggttacatgacccgaaattgaatcacacctgagagctacatcccgtcccctctttgcgactttgtaccttggggactgggagactccagcacctgtgtgatctgtggaatcaagcctggtgtcatctgagcgggctggcaaggc

SEQ ID NO: 365 - DNA, 495 bp, Artificial Sequence
  source: /note="Description of Artificial Sequence: Synthetic polynucleotide"
gcctccctcgcgccatcagagagtgtctcgtgaagctgtggacccacttttccctgtgacggatctgcaaaagaacctgaaaaatgtcttacctacaactgtgagtctggtgccttgtccaaagaaagcttcagtgtcgacagagtgtctcgtgaagtcacttctggcacagagatacacagccgagtcgcccttgctctgtgcgctggatcttcaggtggagaaagatcctcagacctctctgtggagaattgatcactgagcagccctgatttatcttgttgagtttcatcctggaaggaagtcagaaactcttggccctgccccagggtctgtcggtaccaataaagggttacctgacccgaaattggatcacacctgggagctacatcctgtcccctctgtgtgacttcgtaccttggggactgggagactccagcacctgtgtgatctgtggaaaagagtgtctcgtgaagctgagcgggctggcaaggc

SEQ ID NO: 366 - DNA, 495 bp, Artificial Sequence
  source: /note="Description of Artificial Sequence: Synthetic polynucleotide"
gcctccctcgcgccatcaggttccgaatcgtgaagatttcccaggacagagtcctccctcatcgcacccctcctagagacccccagccttacctacaacggttaacctggtccccgaaccgaaggtgtagccatagtcgacgttccgaatcgtgaagtcacttctggcacagagatacacagccgagtcgcccttgctctgtgcgctggatcttcaggtggagaaagatcctcagacctctctgtggagaattgatcactgagcagccctgatttatcttgttgagtttcatcctggaaggaagtcagaaactcttggccctgccccagggtctgtcggtaccaataaagggttacctgacccgaaattggatcacacctgggagctacatcctgtcccctctgtgtgacttcgtaccttggggactgggagactccagcacctgtgtgatctgtggaaagttccgaatcgtgaagctgagcgggctggcaaggc

SEQ ID NO: 367 - DNA, 495 bp, Artificial Sequence
  source: /note="Description of Artificial Sequence: Synthetic polynucleotide"
gcctccctcgcgccatcagcgttactttcgtgaagctggattccagcccctttttgcaagttcccagctgtccagccttgacttactcacctacaacagtgagccaacttccctctccaaaatatatggtgtttcgtcgaccgttactttcgtgaagtcacttctggcacagagatacacagccgagtcgcccttgctctgtgcgctggatcttcaggtggagaaagatcctcagacctctctgtggagaattgatcactgagcagccctgatttatcttgttgagtttcatcctggaaggaagtcagaaactcttggccctgccccagggtctgtcggtaccaataaagggttacctgacccgaaattggatcacacctgggagctacatcctgtcccctctgtgtgacttcgtaccttggggactgggagactccagcacctgtgtgatctgtggaaacgttactttcgtgaagctgagcgggctggcaaggc

SEQ ID NO: 368 - DNA, 495 bp, Artificial Sequence
  source: /note="Description of Artificial Sequence: Synthetic polynucleotide"
gcctccctcgcgccatcagtaggagactcgtgaagctcctggaactccgaccttatgatacactatcccgaaagaagtcttttacatacccaagacagagagctgggttccactgccaaaaaacagtttttcattgtcgactaggagactcgtgaagtcacttctggcacagagatacacagccgagtcgcccttgctctgtgcgctggatcttcaggtggagaaagatcctcagacctctctgtggagaattgatcactgagcagccctgatttatcttgttgagtttcatcctggaaggaagtcagaaactcttggccctgccccagggtctgtcggtaccaataaagggttacctgacccgaaattggatcacacctgggagctacatcctgtcccctctgtgtgacttcgtaccttggggactgggagactccagcacctgtgtgatctgtggaaataggagactcgtgaagctgagcgggctggcaaggc

SEQ ID NO: 369 - DNA, 495 bp, Artificial Sequence
  source: /note="Description of Artificial Sequence: Synthetic polynucleotide"
gcctccctcgcgccatcaggacactcttcgtgaagagagaactctgccttcaagggacaatggccataccaccctgattctgcaacttacctaggatggagagtcgagtcccatcaccaaaatgctggggctgatgtcgacgacactcttcgtgaagtcacttctggcacagagatacacagccgagtcgcccttgctctgtgcgctggatcttcaggtggagaaagatcctcagacctctctgtggagaattgatcactgagcagccctgatttatcttgttgagtttcatcctggaaggaagtcagaaactcttggccctgccccagggtctgtcggtaccaataaagggttacctgacccgaaattggatcacacctgggagctacatcctgtcccctctgtgtgacttcgtaccttggggactgggagactccagcacctgtgtgatctgtggaaagacactcttcgtgaagctgagcgggctggcaaggc

SEQ ID NO: 370 - DNA, 495 bp, Artificial Sequence
  source: /note="Description of Artificial Sequence: Synthetic polynucleotide"
gcctccctcgcgccatcagttcggaactcgtgaagatcattgcagtcaaacccaggcacccccgagtcaagagtggagcccccatacctgtcacagtgagcctggtcccgttcccaaagtggaggggtgaattatgtcgacttcggaactcgtgaagtcacttctggcacagagatacacagccgagtcgcccttgctctgtgcgctggatcttcaggtggagaaagatcctcagacctctctgtggagaattgatcactgagcagccctgatttatcttgttgagtttcatcctggaaggaagtcagaaactcttggccctgccccagggtctgtcggtaccaataaagggttacctgacccgaaattggatcacacctgggagctacatcctgtcccctctgtgtgacttcgtaccttggggactgggagactccagcacctgtgtgatctgtggaaattcggaactcgtgaagctgagcgggctggcaaggc

SEQ ID NO: 371 - DNA, 495 bp, Artificial Sequence
  source: /note="Description of Artificial Sequence: Synthetic polynucleotide"
gcctccctcgcgccatcagaagtaacgtcgtgaaggggtcgtgcaggctgggctgctcaccctctctcccacctggagcccccttcttacctagcacggtgagccgtgtccctggcccgaagaactgctcattgtgtcgacaagtaacgtcgtgaagtcacttctggcacagagatacacagccgagtcgcccttgctctgtgcgctggatcttcaggtggagaaagatcctcagacctctctgtggagaattgatcactgagcagccctgatttatcttgttgagtttcatcctggaaggaagtcagaaactcttggccctgccccagggtctgtcggtaccaataaagggttacctgacccgaaattggatcacacctgggagctacatcctgtcccctctgtgtgacttcgtaccttggggactgggagactccagcacctgtgtgatctgtggaaaaagtaacgtcgtgaagctgagcgggctggcaaggc

SEQ ID NO: 372 - DNA, 495 bp, Artificial Sequence
  source: /note="Description of Artificial Sequence: Synthetic polynucleotide"
gcctccctcgcgccatcaggtctcctatcgtgaagcctctgcccatcccgccctctcggagctctccggagccccaaccgcctccttacccagtacggtcagcctagagccttctccaaaaaacagctccccggtgtcgacgtctcctatcgtgaagtcacttctggcacagagatacacagccgagtcgcccttgctctgtgcgctggatcttcaggtggagaaagatcctcagacctctctgtggagaattgatcactgagcagccctgatttatcttgttgagtttcatcctggaaggaagtcagaaactcttggccctgccccagggtctgtcggtaccaataaagggttacctgacccgaaattggatcacacctgggagctacatcctgtcccctctgtgtgacttcgtaccttggggactgggagactccagcacctgtgtgatctgtggaaagtctcctatcgtgaagctgagcgggctggcaaggc

SEQ ID NO: 373 - DNA, 495 bp, Artificial Sequence
  source: /note="Description of Artificial Sequence: Synthetic polynucleotide"
gcctccctcgcgccatcaggtagacactcgtgaaggcgtcccggggcgccccctccccagttccggggcttcagcgggagcccccgcttaccgagcactgtcagccgggtgcctgggccaaaatactgcgtatctgtcgacgtagacactcgtgaagtcacttctggcacagagatacacagccgagtcgcccttgctctgtgcgctggatcttcaggtggagaaagatcctcagacctctctgtggagaattgatcactgagcagccctgatttatcttgttgagtttcatcctggaaggaagtcagaaactcttggccctgccccagggtctgtcggtaccaataaagggttacctgacccgaaattggatcacacctgggagctacatcctgtcccctctgtgtgacttcgtaccttggggactgggagactccagcacctgtgtgatctgtggaaagtagacactcgtgaagctgagcgggctggcaaggc

SEQ ID NO: 374 - DNA, 495 bp, Artificial Sequence
  source: /note="Description of Artificial Sequence: Synthetic polynucleotide"
gcctccctcgcgccatcagcactgtactcgtgaagcgcacaaaaacccgagcgcagtctcgtccccggtcccccggcggccccagcttacccagcactgagagccgggtcccggcgccgaagtactgaatgttttgtcgaccactgtactcgtgaagtcacttctggcacagagatacacagccgagtcgcccttgctctgtgcgctggatcttcaggtggagaaagatcctcagacctctctgtggagaattgatcactgagcagccctgatttatcttgttgagtttcatcctggaaggaagtcagaaactcttggccctgccccagggtctgtcggtaccaataaagggttacctgacccgaaattggatcacacctgggagctacatcctgtcccctctgtgtgacttcgtaccttggggactgggagactccagcacctgtgtgatctgtggaaacactgtactcgtgaagctgagcgggctggcaaggc

SEQ ID NO: 375 - DNA, 495 bp, Artificial Sequence
  source: /note="Description of Artificial Sequence: Synthetic polynucleotide"
gcctccctcgcgccatcaggatgatcctcgtgaagccccgcaaaaaccagacccaagccgcccgcgcccgcgccccagcagcccgcgctcaccgagcaccaggagccgcgtgcctggcccgaagtactgggtctcgtcgacgatgatcctcgtgaagtcacttctggcacagagatacacagccgagtcgcccttgctctgtgcgctggatcttcaggtggagaaagatcctcagacctctctgtggagaattgatcactgagcagccctgatttatcttgttgagtttcatcctggaaggaagtcagaaactcttggccctgccccagggtctgtcggtaccaataaagggttacctgacccgaaattggatcacacctgggagctacatcctgtcccctctgtgtgacttcgtaccttggggactgggagactccagcacctgtgtgatctgtggaaagatgatcctcgtgaagctgagcgggctggcaaggc

SEQ ID NO: 376 - DNA, 495 bp, Artificial Sequence
  source: /note="Description of Artificial Sequence: Synthetic polynucleotide"
gcctccctcgcgccatcagcgccaatatcgtgaagccgccgccttccacctgaatcccgccgcccgggtggtcccgcgaaaactcacccagcacggtcagcctgctgccggccccgaaagtcaggacgttggcccgtcgaccgccaatatcgtgaagtcacttctggcacagagatacacagccgagtcgcccttgctctgtgcgctggatcttcaggtggagaaagatcctcagacctctctgtggagaattgatcactgagcagccctgatttatcttgttgagtttcatcctggaaggaagtcagaaactcttggccctgccccagggtctgtcggtaccaataaagggttacctgacccgaaattggatcacacctgggagctacatcctgtcccctctgtgtgacttcgtaccttggggactgggagactccagcacctgtgtgatctgtggaaacgccaatatcgtgaagctgagcgggctggcaaggc

SEQ ID NO: 377 - DNA, 495 bp, Artificial Sequence
  source: /note="Description of Artificial Sequence: Synthetic polynucleotide"
gcctccctcgcgccatcagtcaagccttcgtgaagccaccctccgactccggggaccgaggggctggaaggtggggagacgcccgaatctcacctgtgaccgtgagcctggtgcccggcccgaagtactgctcgtgtcgactcaagccttcgtgaagtcacttctggcacagagatacacagccgagtcgcccttgctctgtgcgctggatcttcaggtggagaaagatcctcagacctctctgtggagaattgatcactgagcagccctgatttatcttgttgagtttcatcctggaaggaagtcagaaactcttggccctgccccagggtctgtcggtaccaataaagggttacctgacccgaaattggatcacacctgggagctacatcctgtcccctctgtgtgacttcgtaccttggggactgggagactccagcacctgtgtgatctgtggaaatcaagccttcgtgaagctgagcgggctggcaaggc

SEQ ID NO: 378 - DNA, 495 bp, Artificial Sequence
  source: /note="Description of Artificial Sequence: Synthetic polynucleotide"
gcctccctcgcgccatcagagagtgtccactagctctgtggacccacttttccctgtgacggatctgcaaaagaacctgaaaaatgtcttacctacaactgtgagtctggtgccttgtccaaagaaagcttcagtgtcgacagagtgtccactagcttcactgctggcacagcgatacatggccgagtcccgctgctctgtgcgctggatcgtcagagtggagatggatccctcaggcctctctgcagagaaccgatcattgggcagccctgatttgtcttgttgggcttcataattgaagtaagtcagaaactctgggccctgccccagggcctgtcggtaccaataaagggatacatgacccgaaattggatcacacctgagagctacatcctgtcccctctttgtgactttgtacctgggagactgggagactccagcacctgtgtgatctgtggaaagagtgtccactagctctgagcgggctggcaaggc

SEQ ID NO: 379 - DNA, 495 bp, Artificial Sequence
  source: /note="Description of Artificial Sequence: Synthetic polynucleotide"
gcctccctcgcgccatcaggttccgaacactagctatttcccaggacagagtcctccctcatcgcacccctcctagagacccccagccttacctacaacggttaacctggtccccgaaccgaaggtgtagccatagtcgacgttccgaacactagcttcactgctggcacagcgatacatggccgagtcccgctgctctgtgcgctggatcgtcagagtggagatggatccctcaggcctctctgcagagaaccgatcattgggcagccctgatttgtcttgttgggcttcataattgaagtaagtcagaaactctgggccctgccccagggcctgtcggtaccaataaagggatacatgacccgaaattggatcacacctgagagctacatcctgtcccctctttgtgactttgtacctgggagactgggagactccagcacctgtgtgatctgtggaagttccgaacactagctctgagcgggctggcaaggc

SEQ ID NO: 380 - DNA, 495 bp, Artificial Sequence
  source: /note="Description of Artificial Sequence: Synthetic polynucleotide"
gcctccctcgcgccatcagcgttacttcactagctctggattccagcccctttttgcaagttcccagctgtccagccttgacttactcacctacaacagtgagccaacttccctctccaaaatatatggtgtttcgtcgaccgttacttcactagcttcactgctggcacagcgatacatggccgagtcccgctgctctgtgcgctggatcgtcagagtggagatggatccctcaggcctctctgcagagaaccgatcattgggcagccctgatttgtcttgttgggcttcataattgaagtaagtcagaaactctgggccctgccccagggcctgtcggtaccaataaagggatacatgacccgaaattggatcacacctgagagctacatcctgtcccctctttgtgactttgtacctgggagactgggagactccagcacctgtgtgatctgtggaacgttacttcactagctctgagcgggctggcaaggc

SEQ ID NO: 381 - DNA, 495 bp, Artificial Sequence
  source: /note="Description of Artificial Sequence: Synthetic polynucleotide"
gcctccctcgcgccatcagtaggagaccactagctctcctggaactccgaccttatgatacactatcccgaaagaagtcttttacatacccaagacagagagctgggttccactgccaaaaaacagtttttcattgtcgactaggagaccactagcttcactgctggcacagcgatacatggccgagtcccgctgctctgtgcgctggatcgtcagagtggagatggatccctcaggcctctctgcagagaaccgatcattgggcagccctgatttgtcttgttgggcttcataattgaagtaagtcagaaactctgggccctgccccagggcctgtcggtaccaataaagggatacatgacccgaaattggatcacacctgagagctacatcctgtcccctctttgtgactttgtacctgggagactgggagactccagcacctgtgtgatctgtggaataggagaccactagctctgagcgggctggcaaggc

SEQ ID NO: 382 - DNA, 495 bp, Artificial Sequence
  source: /note="Description of Artificial Sequence: Synthetic polynucleotide"
gcctccctcgcgccatcaggacactctcactagctagagaactctgccttcaagggacaatggccataccaccctgattctgcaacttacctaggatggagagtcgagtcccatcaccaaaatgctggggctgatgtcgacgacactctcactagcttcactgctggcacagcgatacatggccgagtcccgctgctctgtgcgctggatcgtcagagtggagatggatccctcaggcctctctgcagagaaccgatcattgggcagccctgatttgtcttgttgggcttcataattgaagtaagtcagaaactctgggccctgccccagggcctgtcggtaccaataaagggatacatgacccgaaattggatcacacctgagagctacatcctgtcccctctttgtgactttgtacctgggagactgggagactccagcacctgtgtgatctgtggaagacactctcactagctctgagcgggctggcaaggc

SEQ ID NO: 383 - DNA, 495 bp, Artificial Sequence
  source: /note="Description of Artificial Sequence: Synthetic polynucleotide"
gcctccctcgcgccatcagttcggaaccactagctatcattgcagtcaaacccaggcacccccgagtcaagagtggagcccccatacctgtcacagtgagcctggtcccgttcccaaagtggaggggtgaattatgtcgacttcggaaccactagcttcactgctggcacagcgatacatggccgagtcccgctgctctgtgcgctggatcgtcagagtggagatggatccctcaggcctctctgcagagaaccgatcattgggcagccctgatttgtcttgttgggcttcataattgaagtaagtcagaaactctgggccctgccccagggcctgtcggtaccaataaagggatacatgacccgaaattggatcacacctgagagctacatcctgtcccctctttgtgactttgtacctgggagactgggagactccagcacctgtgtgatctgtggaattcggaaccactagctctgagcgggctggcaaggc

SEQ ID NO: 384 - DNA, 495 bp, Artificial Sequence
  source: /note="Description of Artificial Sequence: Synthetic polynucleotide"
gcctccctcgcgccatcagaagtaacgcactagctgggtcgtgcaggctgggctgctcaccctctctcccacctggagcccccttcttacctagcacggtgagccgtgtccctggcccgaagaactgctcattgtgtcgacaagtaacgcactagcttcactgctggcacagcgatacatggccgagtcccgctgctctgtgcgctggatcgtcagagtggagatggatccctcaggcctctctgcagagaaccgatcattgggcagccctgatttgtcttgttgggcttcataattgaagtaagtcagaaactctgggccctgccccagggcctgtcggtaccaataaagggatacatgacccgaaattggatcacacctgagagctacatcctgtcccctctttgtgactttgtacctgggagactgggagactccagcacctgtgtgatctgtggaaaagtaacgcactagctctgagcgggctggcaaggc

SEQ ID NO: 385 - DNA, 495 bp, Artificial Sequence
  source: /note="Description of Artificial Sequence: Synthetic polynucleotide"
gcctccctcgcgccatcaggtctcctacactagctcctctgcccatcccgccctctcggagctctccggagccccaaccgcctccttacccagtacggtcagcctagagccttctccaaaaaacagctccccggtgtcgacgtctcctacactagcttcactgctggcacagcgatacatggccgagtcccgctgctctgtgcgctggatcgtcagagtggagatggatccctcaggcctctctgcagagaaccgatcattgggcagccctgatttgtcttgttgggcttcataattgaagtaagtcagaaactctgggccctgccccagggcctgtcggtaccaataaagggatacatgacccgaaattggatcacacctgagagctacatcctgtcccctctttgtgactttgtacctgggagactgggagactccagcacctgtgtgatctgtggaagtctcctacactagctctgagcgggctggcaaggc

SEQ ID NO: 386 - DNA, 495 bp, Artificial Sequence
  source: /note="Description of Artificial Sequence: Synthetic polynucleotide"
gcctccctcgcgccatcaggtagacaccactagctgcgtcccggggcgccccctccccagttccggggcttcagcgggagcccccgcttaccgagcactgtcagccgggtgcctgggccaaaatactgcgtatctgtcgacgtagacaccactagcttcactgctggcacagcgatacatggccgagtcccgctgctctgtgcgctggatcgtcagagtggagatggatccctcaggcctctctgcagagaaccgatcattgggcagccctgatttgtcttgttgggcttcataattgaagtaagtcagaaactctgggccctgccccagggcctgtcggtaccaataaagggatacatgacccgaaattggatcacacctgagagctacatcctgtcccctctttgtgactttgtacctgggagactgggagactccagcacctgtgtgatctgtggaagtagacaccactagctctgagcgggctggcaaggc

SEQ ID NO: 387 - DNA, 495 bp, Artificial Sequence
  source: /note="Description of Artificial Sequence: Synthetic polynucleotide"
gcctccctcgcgccatcagcactgtaccactagctcgcacaaaaacccgagcgcagtctcgtccccggtcccccggcggccccagcttacccagcactgagagccgggtcccggcgccgaagtactgaatgttttgtcgaccactgtaccactagcttcactgctggcacagcgatacatggccgagtcccgctgctctgtgcgctggatcgtcagagtggagatggatccctcaggcctctctgcagagaaccgatcattgggcagccctgatttgtcttgttgggcttcataattgaagtaagtcagaaactctgggccctgccccagggcctgtcggtaccaataaagggatacatgacccgaaattggatcacacctgagagctacatcctgtcccctctttgtgactttgtacctgggagactgggagactccagcacctgtgtgatctgtggaacactgtaccactagctctgagcgggctggcaaggc

SEQ ID NO: 388 - DNA, 495 bp, Artificial Sequence
  source: /note="Description of Artificial Sequence: Synthetic polynucleotide"
gcctccctcgcgccatcaggatgatcccactagctccccgcaaaaaccagacccaagccgcccgcgcccgcgccccagcagcccgcgctcaccgagcaccaggagccgcgtgcctggcccgaagtactgggtctcgtcgacgatgatcccactagcttcactgctggcacagcgatacatggccgagtcccgctgctctgtgcgctggatcgtcagagtggagatggatccctcaggcctctctgcagagaaccgatcattgggcagccctgatttgtcttgttgggcttcataattgaagtaagtcagaaactctgggccctgccccagggcctgtcggtaccaataaagggatacatgacccgaaattggatcacacctgagagctacatcctgtcccctctttgtgactttgtacctgggagactgggagactccagcacctgtgtgatctgtggaagatgatcccactagctctgagcgggctggcaaggc

SEQ ID NO: 389 - DNA, 495 bp, Artificial Sequence
  source: /note="Description of Artificial Sequence: Synthetic polynucleotide"
gcctccctcgcgccatcagcgccaatacactagctccgccgccttccacctgaatcccgccgcccgggtggtcccgcgaaaactcacccagcacggtcagcctgctgccggccccgaaagtcaggacgttggcccgtcgaccgccaatacactagcttcactgctggcacagcgatacatggccgagtcccgctgctctgtgcgctggatcgtcagagtggagatggatccctcaggcctctctgcagagaaccgatcattgggcagccctgatttgtcttgttgggcttcataattgaagtaagtcagaaactctgggccctgccccagggcctgtcggtaccaataaagggatacatgacccgaaattggatcacacctgagagctacatcctgtcccctctttgtgactttgtacctgggagactgggagactccagcacctgtgtgatctgtggaacgccaatacactagctctgagcgggctggcaaggc

SEQ ID NO: 390 - DNA, 495 bp, Artificial Sequence
  source: /note="Description of Artificial Sequence: Synthetic polynucleotide"
gcctccctcgcgccatcagtcaagcctcactagctccaccctccgactccggggaccgaggggctggaaggtggggagacgcccgaatctcacctgtgaccgtgagcctggtgcccggcccgaagtactgctcgtgtcgactcaagcctcactagcttcactgctggcacagcgatacatggccgagtcccgctgctctgtgcgctggatcgtcagagtggagatggatccctcaggcctctctgcagagaaccgatcattgggcagccctgatttgtcttgttgggcttcataattgaagtaagtcagaaactctgggccctgccccagggcctgtcggtaccaataaagggatacatgacccgaaattggatcacacctgagagctacatcctgtcccctctttgtgactttgtacctgggagactgggagactccagcacctgtgtgatctgtggaatcaagcctcactagctctgagcgggctggcaaggc

SEQ ID NO: 391 - DNA, 495 bp, Artificial Sequence
  source: /note="Description of Artificial Sequence: Synthetic polynucleotide"
gcctccctcgcgccatcagagagtgtccttggttactgtggacccacttttccctgtgacggatctgcaaaagaacctgaaaaatgtcttacctacaactgtgagtctggtgccttgtccaaagaaagcttcagtgtcgacagagtgtccttggttatcactgctggcacagcgatacatggctgagtcccgctgctctgtgcgctgaatcgtcagagtggagatggatccctcaggcctctctgcagagaaccgatcactgggcagccctgatttgtctggttgagcttcataattgaagtaagtcagaaactctgggccctgccccagggcctgttgataccaataaagggttgcatgactcgaaattggatcacacctgagagttacatcctgtcccctctttgtgactttgtacctgggagactgggagactccagcacctgtgtgatctgtggaaagagtgtccttggttactgagcgggctggcaaggc

SEQ ID NO: 392 - DNA, 495 bp, Artificial Sequence
  source: /note="Description of Artificial Sequence: Synthetic polynucleotide"
gcctccctcgcgccatcaggttccgaacttggttaatttcccaggacagagtcctccctcatcgcacccctcctagagacccccagccttacctacaacggttaacctggtccccgaaccgaaggtgtagccatagtcgacgttccgaacttggttatcactgctggcacagcgatacatggctgagtcccgctgctctgtgcgctgaatcgtcagagtggagatggatccctcaggcctctctgcagagaaccgatcactgggcagccctgatttgtctggttgagcttcataattgaagtaagtcagaaactctgggccctgccccagggcctgttgataccaataaagggttgcatgactcgaaattggatcacacctgagagttacatcctgtcccctctttgtgactttgtacctgggagactgggagactccagcacctgtgtgatctgtggaagttccgaacttggttactgagcgggctggcaaggc

SEQ ID NO: 393 - DNA, 495 bp, Artificial Sequence
  source: /note="Description of Artificial Sequence: Synthetic polynucleotide"
gcctccctcgcgccatcagcgttacttcttggttactggattccagcccctttttgcaagttcccagctgtccagccttgacttactcacctacaacagtgagccaacttccctctccaaaatatatggtgtttcgtcgaccgttacttcttggttatcactgctggcacagcgatacatggctgagtcccgctgctctgtgcgctgaatcgtcagagtggagatggatccctcaggcctctctgcagagaaccgatcactgggcagccctgatttgtctggttgagcttcataattgaagtaagtcagaaactctgggccctgccccagggcctgttgataccaataaagggttgcatgactcgaaattggatcacacctgagagttacatcctgtcccctctttgtgactttgtacctgggagactgggagactccagcacctgtgtgatctgtggaacgttacttcttggttactgagcgggctggcaaggc

SEQ ID NO: 394 - DNA, 495 bp, Artificial Sequence
  source: /note="Description of Artificial Sequence: Synthetic polynucleotide"
gcctccctcgcgccatcagtaggagaccttggttactcctggaactccgaccttatgatacactatcccgaaagaagtcttttacatacccaagacagagagctgggttccactgccaaaaaacagtttttcattgtcgactaggagaccttggttatcactgctggcacagcgatacatggctgagtcccgctgctctgtgcgctgaatcgtcagagtggagatggatccctcaggcctctctgcagagaaccgatcactgggcagccctgatttgtctggttgagcttcataattgaagtaagtcagaaactctgggccctgccccagggcctgttgataccaataaagggttgcatgactcgaaattggatcacacctgagagttacatcctgtcccctctttgtgactttgtacctgggagactgggagactccagcacctgtgtgatctgtggaataggagaccttggttactgagcgggctggcaaggc

SEQ ID NO: 395 - DNA, 495 bp, Artificial Sequence
  source: /note="Description of Artificial Sequence: Synthetic polynucleotide"
gcctccctcgcgccatcaggacactctcttggttaagagaactctgccttcaagggacaatggccataccaccctgattctgcaacttacctaggatggagagtcgagtcccatcaccaaaatgctggggctgatgtcgacgacactctcttggttatcactgctggcacagcgatacatggctgagtcccgctgctctgtgcgctgaatcgtcagagtggagatggatccctcaggcctctctgcagagaaccgatcactgggcagccctgatttgtctggttgagcttcataattgaagtaagtcagaaactctgggccctgccccagggcctgttgataccaataaagggttgcatgactcgaaattggatcacacctgagagttacatcctgtcccctctttgtgactttgtacctgggagactgggagactccagcacctgtgtgatctgtggaagacactctcttggttactgagcgggctggcaaggc

SEQ ID NO: 396 - DNA, 495 bp, Artificial Sequence
  source: /note="Description of Artificial Sequence: Synthetic polynucleotide"
gcctccctcgcgccatcagttcggaaccttggttaatcattgcagtcaaacccaggcacccccgagtcaagagtggagcccccatacctgtcacagtgagcctggtcccgttcccaaagtggaggggtgaattatgtcgacttcggaaccttggttatcactgctggcacagcgatacatggctgagtcccgctgctctgtgcgctgaatcgtcagagtggagatggatccctcaggcctctctgcagagaaccgatcactgggcagccctgatttgtctggttgagcttcataattgaagtaagtcagaaactctgggccctgccccagggcctgttgataccaataaagggttgcatgactcgaaattggatcacacctgagagttacatcctgtcccctctttgtgactttgtacctgggagactgggagactccagcacctgtgtgatctgtggaattcggaaccttggttactgagcgggctggcaaggc

SEQ ID NO: 397 - DNA, 495 bp, Artificial Sequence
  source: /note="Description of Artificial Sequence: Synthetic polynucleotide"
gcctccctcgcgccatcagaagtaacgcttggttagggtcgtgcaggctgggctgctcaccctctctcccacctggagcccccttcttacctagcacggtgagccgtgtccctggcccgaagaactgctcattgtgtcgacaagtaacgcttggttatcactgctggcacagcgatacatggctgagtcccgctgctctgtgcgctgaatcgtcagagtggagatggatccctcaggcctctctgcagagaaccgatcactgggcagccctgatttgtctggttgagcttcataattgaagtaagtcagaaactctgggccctgccccagggcctgttgataccaataaagggttgcatgactcgaaattggatcacacctgagagttacatcctgtcccctctttgtgactttgtacctgggagactgggagactccagcacctgtgtgatctgtggaaaagtaacgcttggttactgagcgggctggcaaggc

SEQ ID NO: 398 - DNA, 495 bp, Artificial Sequence
  source: /note="Description of Artificial Sequence: Synthetic polynucleotide"
gcctccctcgcgccatcaggtctcctacttggttacctctgcccatcccgccctctcggagctctccggagccccaaccgcctccttacccagtacggtcagcctagagccttctccaaaaaacagctccccggtgtcgacgtctcctacttggttatcactgctggcacagcgatacatggctgagtcccgctgctctgtgcgctgaatcgtcagagtggagatggatccctcaggcctctctgcagagaaccgatcactgggcagccctgatttgtctggttgagcttcataattgaagtaagtcagaaactctgggccctgccccagggcctgttgataccaataaagggttgcatgactcgaaattggatcacacctgagagttacatcctgtcccctctttgtgactttgtacctgggagactgggagactccagcacctgtgtgatctgtggaagtctcctacttggttactgagcgggctggcaaggc

SEQ ID NO: 399 - DNA, 495 bp, Artificial Sequence
  source: /note="Description of Artificial Sequence: Synthetic polynucleotide"
gcctccctcgcgccatcaggtagacaccttggttagcgtcccggggcgccccctccccagttccggggcttcagcgggagcccccgcttaccgagcactgtcagccgggtgcctgggccaaaatactgcgtatctgtcgacgtagacaccttggttatcactgctggcacagcgatacatggctgagtcccgctgctctgtgcgctgaatcgtcagagtggagatggatccctcaggcctctctgcagagaaccgatcactgggcagccctgatttgtctggttgagcttcataattgaagtaagtcagaaactctgggccctgccccagggcctgttgataccaataaagggttgcatgactcgaaattggatcacacctgagagttacatcctgtcccctctttgtgactttgtacctgggagactgggagactccagcacctgtgtgatctgtggaagtagacaccttggttactgagcgggctggcaaggc

SEQ ID NO: 400 - DNA, 495 bp, Artificial Sequence
  source: /note="Description of Artificial Sequence: Synthetic polynucleotide"
gcctccctcgcgccatcagcactgtaccttggttacgcacaaaaacccgagcgcagtctcgtccccggtcccccggcggccccagcttacccagcactgagagccgggtcccggcgccgaagtactgaatgttttgtcgaccactgtaccttggttatcactgctggcacagcgatacatggctgagtcccgctgctctgtgcgctgaatcgtcagagtggagatggatccctcaggcctctctgcagagaaccgatcactgggcagccctgatttgtctggttgagcttcataattgaagtaagtcagaaactctgggccctgccccagggcctgttgataccaataaagggttgcatgactcgaaattggatcacacctgagagttacatcctgtcccctctttgtgactttgtacctgggagactgggagactccagcacctgtgtgatctgtggaacactgtaccttggttactgagcgggctggcaaggc

SEQ ID NO: 401 - DNA, 495 bp, Artificial Sequence
  source: /note="Description of Artificial Sequence: Synthetic polynucleotide"
gcctccctcgcgccatcaggatgatcccttggttaccccgcaaaaaccagacccaagccgcccgcgcccgcgccccagcagcccgcgctcaccgagcaccaggagccgcgtgcctggcccgaagtactgggtctcgtcgacgatgatcccttggttatcactgctggcacagcgatacatggctgagtcccgctgctctgtgcgctgaatcgtcagagtggagatggatccctcaggcctctctgcagagaaccgatcactgggcagccctgatttgtctggttgagcttcataattgaagtaagtcagaaactctgggccctgccccagggcctgttgataccaataaagggttgcatgactcgaaattggatcacacctgagagttacatcctgtcccctctttgtgactttgtacctgggagactgggagactccagcacctgtgtgatctgtggaagatgatcccttggttactgagcgggctggcaaggc

SEQ ID NO: 402 - DNA, 495 bp, Artificial Sequence
  source: /note="Description of Artificial Sequence: Synthetic polynucleotide"
gcctccctcgcgccatcagcgccaatacttggttaccgccgccttccacctgaatcccgccgcccgggtggtcccgcgaaaactcacccagcacggtcagcctgctgccggccccgaaagtcaggacgttggcccgtcgaccgccaatacttggttatcactgctggcacagcgatacatggctgagtcccgctgctctgtgcgctgaatcgtcagagtggagatggatccctcaggcctctctgcagagaaccgatcactgggcagccctgatttgtctggttgagcttcataattgaagtaagtcagaaactctgggccctgccccagggcctgttgataccaataaagggttgcatgactcgaaattggatcacacctgagagttacatcctgtcccctctttgtgactttgtacctgggagactgggagactccagcacctgtgtgatctgtggaacgccaatacttggttactgagcgggctggcaaggc

SEQ ID NO: 403 - DNA, 495 bp, Artificial Sequence
  source: /note="Description of Artificial Sequence: Synthetic polynucleotide"
gcctccctcgcgccatcagtcaagcctcttggttaccaccctccgactccggggaccgaggggctggaaggtggggagacgcccgaatctcacctgtgaccgtgagcctggtgcccggcccgaagtactgctcgtgtcgactcaagcctcttggttatcactgctggcacagcgatacatggctgagtcccgctgctctgtgcgctgaatcgtcagagtggagatggatccctcaggcctctctgcagagaaccgatcactgggcagccctgatttgtctggttgagcttcataattgaagtaagtcagaaactctgggccctgccccagggcctgttgataccaataaagggttgcatgactcgaaattggatcacacctgagagttacatcctgtcccctctttgtgactttgtacctgggagactgggagactccagcacctgtgtgatctgtggaatcaagcctcttggttactgagcgggctggcaaggc

SEQ ID NO: 404 - DNA, 495 bp, Artificial Sequence
  source: /note="Description of Artificial Sequence: Synthetic polynucleotide"
gcctccctcgcgccatcagagagtgtcacctcttgctgtggacccacttttccctgtgacggatctgcaaaagaacctgaaaaatgtcttacctacaactgtgagtctggtgccttgtccaaagaaagcttcagtgtcgacagagtgtcacctcttgtcactgctggcacagagatacacggcggagtcctcctgctgtgtgcgctggatcttcagagtggagacggatccctcaggcctttctgcaaagaagcgatcactgggcagccccgatttgtctagttgagcttcattctggaaataagtcagaaactctggcccctgccccagggcctgttggtaccaaaaaagggatacatgacccgaaattggatcacacctgagagctacatcctgtcctctctttgcgactttgtacctaggggactgggagactccagcacctgtgtgatctgtggaaagagtgtcacctcttgctgagcgggctggcaaggc

SEQ ID NO: 405 - DNA, 495 bp, Artificial Sequence
  source: /note="Description of Artificial Sequence: Synthetic polynucleotide"
gcctccctcgcgccatcaggttccgaaacctcttgatttcccaggacagagtcctccctcatcgcacccctcctagagacccccagccttacctacaacggttaacctggtccccgaaccgaaggtgtagccatagtcgacgttccgaaacctcttgtcactgctggcacagagatacacggcggagtcctcctgctgtgtgcgctggatcttcagagtggagacggatccctcaggcctttctgcaaagaagcgatcactgggcagccccgatttgtctagttgagcttcattctggaaataagtcagaaactctggcccctgccccagggcctgttggtaccaaaaaagggatacatgacccgaaattggatcacacctgagagctacatcctgtcctctctttgcgactttgtacctaggggactgggagactccagcacctgtgtgatctgtggaagttccgaaacctcttgctgagcgggctggcaaggc

SEQ ID NO: 406 - DNA, 495 bp, Artificial Sequence
  source: /note="Description of Artificial Sequence: Synthetic polynucleotide"
gcctccctcgcgccatcagcgttacttacctcttgctggattccagcccctttttgcaagttcccagctgtccagccttgacttactcacctacaacagtgagccaacttccctctccaaaatatatggtgtttcgtcgaccgttacttacctcttgtcactgctggcacagagatacacggcggagtcctcctgctgtgtgcgctggatcttcagagtggagacggatccctcaggcctttctgcaaagaagcgatcactgggcagccccgatttgtctagttgagcttcattctggaaataagtcagaaactctggcccctgccccagggcctgttggtaccaaaaaagggatacatgacccgaaattggatcacacctgagagctacatcctgtcctctctttgcgactttgtacctaggggactgggagactccagcacctgtgtgatctgtggaacgttacttacctcttgctgagcgggctggcaaggc

SEQ ID NO: 407 - DNA, 495 bp, Artificial Sequence
  source: /note="Description of Artificial Sequence: Synthetic polynucleotide"
gcctccctcgcgccatcagtaggagacacctcttgctcctggaactccgaccttatgatacactatcccgaaagaagtcttttacatacccaagacagagagctgggttccactgccaaaaaacagtttttcattgtcgactaggagacacctcttgtcactgctggcacagagatacacggcggagtcctcctgctgtgtgcgctggatcttcagagtggagacggatccctcaggcctttctgcaaagaagcgatcactgggcagccccgatttgtctagttgagcttcattctggaaataagtcagaaactctggcccctgccccagggcctgttggtaccaaaaaagggatacatgacccgaaattggatcacacctgagagctacatcctgtcctctctttgcgactttgtacctaggggactgggagactccagcacctgtgtgatctgtggaataggagacacctcttgctgagcgggctggcaaggc

SEQ ID NO: 408 - DNA, 495 bp, Artificial Sequence
  source: /note="Description of Artificial Sequence: Synthetic polynucleotide"
gcctccctcgcgccatcaggacactctacctcttgagagaactctgccttcaagggacaatggccataccaccctgattctgcaacttacctaggatggagagtcgagtcccatcaccaaaatgctggggctgatgtcgacgacactctacctcttgtcactgctggcacagagatacacggcggagtcctcctgctgtgtgcgctggatcttcagagtggagacggatccctcaggcctttctgcaaagaagcgatcactgggcagccccgatttgtctagttgagcttcattctggaaataagtcagaaactctggcccctgccccagggcctgttggtaccaaaaaagggatacatgacccgaaattggatcacacctgagagctacatcctgtcctctctttgcgactttgtacctaggggactgggagactccagcacctgtgtgatctgtggaagacactctacctcttgctgagcgggctggcaaggc

SEQ ID NO: 409 - DNA, 495 bp, Artificial Sequence
  source: /note="Description of Artificial Sequence: Synthetic polynucleotide"
gcctccctcgcgccatcagttcggaacacctcttgatcattgcagtcaaacccaggcacccccgagtcaagagtggagcccccatacctgtcacagtgagcctggtcccgttcccaaagtggaggggtgaattatgtcgacttcggaacacctcttgtcactgctggcacagagatacacggcggagtcctcctgctgtgtgcgctggatcttcagagtggagacggatccctcaggcctttctgcaaagaagcgatcactgggcagccccgatttgtctagttgagcttcattctggaaataagtcagaaactctggcccctgccccagggcctgttggtaccaaaaaagggatacatgacccgaaattggatcacacctgagagctacatcctgtcctctctttgcgactttgtacctaggggactgggagactccagcacctgtgtgatctgtggaattcggaacacctcttgctgagcgggctggcaaggc

SEQ ID NO: 410 - DNA, 495 bp, Artificial Sequence
  source: /note="Description of Artificial Sequence: Synthetic polynucleotide"
gcctccctcgcgccatcagaagtaacgacctcttggggtcgtgcaggctgggctgctcaccctctctcccacctggagcccccttcttacctagcacggtgagccgtgtccctggcccgaagaactgctcattgtgtcgacaagtaacgacctcttgtcactgctggcacagagatacacggcggagtcctcctgctgtgtgcgctggatcttcagagtggagacggatccctcaggcctttctgcaaagaagcgatcactgggcagccccgatttgtctagttgagcttcattctggaaataagtcagaaactctggcccctgccccagggcctgttggtaccaaaaaagggatacatgacccgaaattggatcacacctgagagctacatcctgtcctctctttgcgactttgtacctaggggactgggagactccagcacctgtgtgatctgtggaaaagtaacgacctcttgctgagcgggctggcaaggc

SEQ ID NO: 411 - DNA, 495 bp, Artificial Sequence
  source: /note="Description of Artificial Sequence: Synthetic polynucleotide"
gcctccctcgcgccatcaggtctcctaacctcttgcctctgcccatcccgccctctcggagctctccggagccccaaccgcctccttacccagtacggtcagcctagagccttctccaaaaaacagctccccggtgtcgacgtctcctaacctcttgtcactgctggcacagagatacacggcggagtcctcctgctgtgtgcgctggatcttcagagtggagacggatccctcaggcctttctgcaaagaagcgatcactgggcagccccgatttgtctagttgagcttcattctggaaataagtcagaaactctggcccctgccccagggcctgttggtaccaaaaaagggatacatgacccgaaattggatcacacctgagagctacatcctgtcctctctttgcgactttgtacctaggggactgggagactccagcacctgtgtgatctgtggaagtctcctaacctcttgctgagcgggctggcaaggc

SEQ ID NO: 412 - DNA, 495 bp, Artificial Sequence
  source: /note="Description of Artificial Sequence: Synthetic polynucleotide"
gcctccctcgcgccatcaggtagacacacctcttggcgtcccggggcgccccctccccagttccggggcttcagcgggagcccccgcttaccgagcactgtcagccgggtgcctgggccaaaatactgcgtatctgtcgacgtagacacacctcttgtcactgctggcacagagatacacggcggagtcctcctgctgtgtgcgctggatcttcagagtggagacggatccctcaggcctttctgcaaagaagcgatcactgggcagccccgatttgtctagttgagcttcattctggaaataagtcagaaactctggcccctgccccagggcctgttggtaccaaaaaagggatacatgacccgaaattggatcacacctgagagctacatcctgtcctctctttgcgactttgtacctaggggactgggagactccagcacctgtgtgatctgtggaagtagacacacctcttgctgagcgggctggcaaggc

SEQ ID NO: 413 - DNA, 495 bp, Artificial Sequence
  source: /note="Description of Artificial Sequence: Synthetic polynucleotide"
gcctccctcgcgccatcagcactgtacacctcttgcgcacaaaaacccgagcgcagtctcgtccccggtcccccggcggccccagcttacccagcactgagagccgggtcccggcgccgaagtactgaatgttttgtcgaccactgtacacctcttgtcactgctggcacagagatacacggcggagtcctcctgctgtgtgcgctggatcttcagagtggagacggatccctcaggcctttctgcaaagaagcgatcactgggcagccccgatttgtctagttgagcttcattctggaaataagtcagaaactctggcccctgccccagggcctgttggtaccaaaaaagggatacatgacccgaaattggatcacacctgagagctacatcctgtcctctctttgcgactttgtacctaggggactgggagactccagcacctgtgtgatctgtggaacactgtacacctcttgctgagcgggctggcaaggc

SEQ ID NO: 414 - DNA, 495 bp, Artificial Sequence
  source: /note="Description of Artificial Sequence: Synthetic polynucleotide"
gcctccctcgcgccatcaggatgatccacctcttgccccgcaaaaaccagacccaagccgcccgcgcccgcgccccagcagcccgcgctcaccgagcaccaggagccgcgtgcctggcccgaagtactgggtctcgtcgacgatgatccacctcttgtcactgctggcacagagatacacggcggagtcctcctgctgtgtgcgctggatcttcagagtggagacggatccctcaggcctttctgcaaagaagcgatcactgggcagccccgatttgtctagttgagcttcattctggaaataagtcagaaactctggcccctgccccagggcctgttggtaccaaaaaagggatacatgacccgaaattggatcacacctgagagctacatcctgtcctctctttgcgactttgtacctaggggactgggagactccagcacctgtgtgatctgtggaagatgatccacctcttgctgagcgggctggcaaggc

SEQ ID NO: 415 - DNA, 495 bp, Artificial Sequence
  source: /note="Description of Artificial Sequence: Synthetic polynucleotide"
gcctccctcgcgccatcagcgccaataacctcttgccgccgccttccacctgaatcccgccgcccgggtggtcccgcgaaaactcacccagcacggtcagcctgctgccggccccgaaagtcaggacgttggcccgtcgaccgccaataacctcttgtcactgctggcacagagatacacggcggagtcctcctgctgtgtgcgctggatcttcagagtggagacggatccctcaggcctttctgcaaagaagcgatcactgggcagccccgatttgtctagttgagcttcattctggaaataagtcagaaactctggcccctgccccagggcctgttggtaccaaaaaagggatacatgacccgaaattggatcacacctgagagctacatcctgtcctctctttgcgactttgtacctaggggactgggagactccagcacctgtgtgatctgtggaacgccaataacctcttgctgagcgggctggcaaggc

SEQ ID NO: 416 - DNA, 495 bp, Artificial Sequence
  source: /note="Description of Artificial Sequence: Synthetic polynucleotide"
gcctccctcgcgccatcagtcaagcctacctcttgccaccctccgactccggggaccgaggggctggaaggtggggagacgcccgaatctcacctgtgaccgtgagcctggtgcccggcccgaagtactgctcgtgtcgactcaagcctacctcttgtcactgctggcacagagatacacggcggagtcctcctgctgtgtgcgctggatcttcagagtggagacggatccctcaggcctttctgcaaagaagcgatcactgggcagccccgatttgtctagttgagcttcattctggaaataagtcagaaactctggcccctgccccagggcctgttggtaccaaaaaagggatacatgacccgaaattggatcacacctgagagctacatcctgtcctctctttgcgactttgtacctaggggactgggagactccagcacctgtgtgatctgtggaatcaagcctacctcttgctgagcgggctggcaaggc

SEQ ID NO: 417 - DNA, 495 bp, Artificial Sequence
  source: /note="Description of Artificial Sequence: Synthetic polynucleotide"
gcctccctcgcgccatcagagagtgtcctgattctctgtggacccacttttccctgtgacggatctgcaaaagaacctgaaaaatgtcttacctacaactgtgagtctggtgccttgtccaaagaaagcttcagtgtcgacagagtgtcctgattcttcactgctggcacagagatacatggccgagtccccctgctctgtgcgctggatctccaaggtggagaaagatcccttaggcctctctgcagagaaccgatcactgagcagccttgatttttctagttgagcttcattctggaagtaagtcagaaactctgggccctgccccagggtctgtcggtaccaataaaggcggttgtgttcagaaattggatcacacctgaaagttacattctgtcccctctttgtgatcttgtgtctggggttctgggagactccagtatctgcgtgatctgtggagagagtgtcctgattctctgagcgggctggcaaggc

SEQ ID NO: 418 - DNA, 495 bp, Artificial Sequence
  source: /note="Description of Artificial Sequence: Synthetic polynucleotide"
gcctccctcgcgccatcaggttccgaactgattctatttcccaggacagagtcctccctcatcgcacccctcctagagacccccagccttacctacaacggttaacctggtccccgaaccgaaggtgtagccatagtcgacgttccgaactgattcttcactgctggcacagagatacatggccgagtccccctgctctgtgcgctggatctccaaggtggagaaagatcccttaggcctctctgcagagaaccgatcactgagcagccttgatttttctagttgagcttcattctggaagtaagtcagaaactctgggccctgccccagggtctgtcggtaccaataaaggcggttgtgttcagaaattggatcacacctgaaagttacattctgtcccctctttgtgatcttgtgtctggggttctgggagactccagtatctgcgtgatctgtggaggttccgaactgattctctgagcgggctggcaaggc

SEQ ID NO: 419 - DNA, 495 bp, Artificial Sequence
  source: /note="Description of Artificial Sequence: Synthetic polynucleotide"
gcctccctcgcgccatcagcgttacttctgattctctggattccagcccctttttgcaagttcccagctgtccagccttgacttactcacctacaacagtgagccaacttccctctccaaaatatatggtgtttcgtcgaccgttacttctgattcttcactgctggcacagagatacatggccgagtccccctgctctgtgcgctggatctccaaggtggagaaagatcccttaggcctctctgcagagaaccgatcactgagcagccttgatttttctagttgagcttcattctggaagtaagtcagaaactctgggccctgccccagggtctgtcggtaccaataaaggcggttgtgttcagaaattggatcacacctgaaagttacattctgtcccctctttgtgatcttgtgtctggggttctgggagactccagtatctgcgtgatctgtggagcgttacttctgattctctgagcgggctggcaaggc

SEQ ID NO: 420 - DNA, 495 bp, Artificial Sequence
  source: /note="Description of Artificial Sequence: Synthetic polynucleotide"
gcctccctcgcgccatcagtaggagacctgattctctcctggaactccgaccttatgatacactatcccgaaagaagtcttttacatacccaagacagagagctgggttccactgccaaaaaacagtttttcattgtcgactaggagacctgattcttcactgctggcacagagatacatggccgagtccccctgctctgtgcgctggatctccaaggtggagaaagatcccttaggcctctctgcagagaaccgatcactgagcagccttgatttttctagttgagcttcattctggaagtaagtcagaaactctgggccctgccccagggtctgtcggtaccaataaaggcggttgtgttcagaaattggatcacacctgaaagttacattctgtcccctctttgtgatcttgtgtctggggttctgggagactccagtatctgcgtgatctgtggagtaggagacctgattctctgagcgggctggcaaggc

SEQ ID NO: 421 - DNA, 495 bp, Artificial Sequence
  source: /note="Description of Artificial Sequence: Synthetic polynucleotide"
gcctccctcgcgccatcaggacactctctgattctagagaactctgccttcaagggacaatggccataccaccctgattctgcaacttacctaggatggagagtcgagtcccatcaccaaaatgctggggctgatgtcgacgacactctctgattcttcactgctggcacagagatacatggccgagtccccctgctctgtgcgctggatctccaaggtggagaaagatcccttaggcctctctgcagagaaccgatcactgagcagccttgatttttctagttgagcttcattctggaagtaagtcagaaactctgggccctgccccagggtctgtcggtaccaataaaggcggttgtgttcagaaattggatcacacctgaaagttacattctgtcccctctttgtgatcttgtgtctggggttctgggagactccagtatctgcgtgatctgtggaggacactctctgattctctgagcgggctggcaaggc

SEQ ID NO: 422 - DNA, 495 bp, Artificial Sequence
  source: /note="Description of Artificial Sequence: Synthetic polynucleotide"
gcctccctcgcgccatcagttcggaacctgattctatcattgcagtcaaacccaggcacccccgagtcaagagtggagcccccatacctgtcacagtgagcctggtcccgttcccaaagtggaggggtgaattatgtcgacttcggaacctgattcttcactgctggcacagagatacatggccgagtccccctgctctgtgcgctggatctccaaggtggagaaagatcccttaggcctctctgcagagaaccgatcactgagcagccttgatttttctagttgagcttcattctggaagtaagtcagaaactctgggccctgccccagggtctgtcggtaccaataaaggcggttgtgttcagaaattggatcacacctgaaagttacattctgtcccctctttgtgatcttgtgtctggggttctgggagactccagtatctgcgtgatctgtggagttcggaacctgattctctgagcgggctggcaaggc

SEQ ID NO: 423 - DNA, 495 bp, Artificial Sequence
  source: /note="Description of Artificial Sequence: Synthetic polynucleotide"
gcctccctcgcgccatcagaagtaacgctgattctgggtcgtgcaggctgggctgctcaccctctctcccacctggagcccccttcttacctagcacggtgagccgtgtccctggcccgaagaactgctcattgtgtcgacaagtaacgctgattcttcactgctggcacagagatacatggccgagtccccctgctctgtgcgctggatctccaaggtggagaaagatcccttaggcctctctgcagagaaccgatcactgagcagccttgatttttctagttgagcttcattctggaagtaagtcagaaactctgggccctgccccagggtctgtcggtaccaataaaggcggttgtgttcagaaattggatcacacctgaaagttacattctgtcccctctttgtgatcttgtgtctggggttctgggagactccagtatctgcgtgatctgtggagaagtaacgctgattctctgagcgggctggcaaggc

SEQ ID NO: 424 - DNA, 495 bp, Artificial Sequence
  source: /note="Description of Artificial Sequence: Synthetic polynucleotide"
gcctccctcgcgccatcaggtctcctactgattctcctctgcccatcccgccctctcggagctctccggagccccaaccgcctccttacccagtacggtcagcctagagccttctccaaaaaacagctccccggtgtcgacgtctcctactgattcttcactgctggcacagagatacatggccgagtccccctgctctgtgcgctggatctccaaggtggagaaagatcccttaggcctctctgcagagaaccgatcactgagcagccttgatttttctagttgagcttcattctggaagtaagtcagaaactctgggccctgccccagggtctgtcggtaccaataaaggcggttgtgttcagaaattggatcacacctgaaagttacattctgtcccctctttgtgatcttgtgtctggggttctgggagactccagtatctgcgtgatctgtggaggtctcctactgattctctgagcgggctggcaaggc

SEQ ID NO: 425 - DNA, 495 bp, Artificial Sequence
  source: /note="Description of Artificial Sequence: Synthetic polynucleotide"
gcctccctcgcgccatcaggtagacacctgattctgcgtcccggggcgccccctccccagttccggggcttcagcgggagcccccgcttaccgagcactgtcagccgggtgcctgggccaaaatactgcgtatctgtcgacgtagacacctgattcttcactgctggcacagagatacatggccgagtccccctgctctgtgcgctggatctccaaggtggagaaagatcccttaggcctctctgcagagaaccgatcactgagcagccttgatttttctagttgagcttcattctggaagtaagtcagaaactctgggccctgccccagggtctgtcggtaccaataaaggcggttgtgttcagaaattggatcacacctgaaagttacattctgtcccctctttgtgatcttgtgtctggggttctgggagactccagtatctgcgtgatctgtggaggtagacacctgattctctgagcgggctggcaaggc

SEQ ID NO: 426 - DNA, 495 bp, Artificial Sequence
  source: /note="Description of Artificial Sequence: Synthetic polynucleotide"
gcctccctcgcgccatcagcactgtacctgattctcgcacaaaaacccgagcgcagtctcgtccccggtcccccggcggccccagcttacccagcactgagagccgggtcccggcgccgaagtactgaatgttttgtcgaccactgtacctgattcttcactgctggcacagagatacatggccgagtccccctgctctgtgcgctggatctccaaggtggagaaagatcccttaggcctctctgcagagaaccgatcactgagcagccttgatttttctagttgagcttcattctggaagtaagtcagaaactctgggccctgccccagggtctgtcggtaccaataaaggcggttgtgttcagaaattggatcacacctgaaagttacattctgtcccctctttgtgatcttgtgtctggggttctgggagactccagtatctgcgtgatctgtggagcactgtacctgattctctgagcgggctggcaaggc

SEQ ID NO: 427 - DNA, 495 bp, Artificial Sequence
  source: /note="Description of Artificial Sequence: Synthetic polynucleotide"
gcctccctcgcgccatcaggatgatccctgattctccccgcaaaaaccagacccaagccgcccgcgcccgcgccccagcagcccgcgctcaccgagcaccaggagccgcgtgcctggcccgaagtactgggtctcgtcgacgatgatccctgattcttcactgctggcacagagatacatggccgagtccccctgctctgtgcgctggatctccaaggtggagaaagatcccttaggcctctctgcagagaaccgatcactgagcagccttgatttttctagttgagcttcattctggaagtaagtcagaaactctgggccctgccccagggtctgtcggtaccaataaaggcggttgtgttcagaaattggatcacacctgaaagttacattctgtcccctctttgtgatcttgtgtctggggttctgggagactccagtatctgcgtgatctgtggaggatgatccctgattctctgagcgggctggcaaggc

SEQ ID NO: 428 - DNA, 495 bp, Artificial Sequence
  source: /note="Description of Artificial Sequence: Synthetic polynucleotide"
gcctccctcgcgccatcagcgccaatactgattctccgccgccttccacctgaatcccgccgcccgggtggtcccgcgaaaactcacccagcacggtcagcctgctgccggccccgaaagtcaggacgttggcccgtcgaccgccaatactgattcttcactgctggcacagagatacatggccgagtccccctgctctgtgcgctggatctccaaggtggagaaagatcccttaggcctctctgcagagaaccgatcactgagcagccttgatttttctagttgagcttcattctggaagtaagtcagaaactctgggccctgccccagggtctgtcggtaccaataaaggcggttgtgttcagaaattggatcacacctgaaagttacattctgtcccctctttgtgatcttgtgtctggggttctgggagactccagtatctgcgtgatctgtggagcgccaatactgattctctgagcgggctggcaaggc

SEQ ID NO: 429 - DNA, 495 bp, Artificial Sequence
  source: /note="Description of Artificial Sequence: Synthetic polynucleotide"
gcctccctcgcgccatcagtcaagcctctgattctccaccctccgactccggggaccgaggggctggaaggtggggagacgcccgaatctcacctgtgaccgtgagcctggtgcccggcccgaagtactgctcgtgtcgactcaagcctctgattcttcactgctggcacagagatacatggccgagtccccctgctctgtgcgctggatctccaaggtggagaaagatcccttaggcctctctgcagagaaccgatcactgagcagccttgatttttctagttgagcttcattctggaagtaagtcagaaactctgggccctgccccagggtctgtcggtaccaataaaggcggttgtgttcagaaattggatcacacctgaaagttacattctgtcccctctttgtgatcttgtgtctggggttctgggagactccagtatctgcgtgatctgtggagtcaagcctctgattctctgagcgggctggcaaggc

SEQ ID NO: 430 - DNA, 495 bp, Artificial Sequence
  source: /note="Description of Artificial Sequence: Synthetic polynucleotide"
gcctccctcgcgccatcagagagtgtcggtcaactctgtggacccacttttccctgtgacggatctgcaaaagaacctgaaaaatgtcttacctacaactgtgagtctggtgccttgtccaaagaaagcttcagtgtcgacagagtgtcggtcaacttcactgccacagaggtacagaggtctggctggtgctagtagactccagggttgagggaaaatgcttgagtttgtttccagagacattgtacccttccttggcaccgcctttggtcatgctgccaatactacctgaataatggatcagcctcagcccctattcttggtcttattgataacagaacactgaataatggttcctaatctgagcaaatttcaggatgatctttttccctgtgtgtctgtgatatcttggtatctggctgatccctgcctccatgggggctgtgggagaggcaggcagagagtgtcggtcaactctgagcgggctggcaaggc

SEQ ID NO: 431 - DNA, 495 bp, Artificial Sequence
  source: /note="Description of Artificial Sequence: Synthetic polynucleotide"
gcctccctcgcgccatcaggttccgaaggtcaactatttcccaggacagagtcctccctcatcgcacccctcctagagacccccagccttacctacaacggttaacctggtccccgaaccgaaggtgtagccatagtcgacgttccgaaggtcaacttcactgccacagaggtacagaggtctggctggtgctagtagactccagggttgagggaaaatgcttgagtttgtttccagagacattgtacccttccttggcaccgcctttggtcatgctgccaatactacctgaataatggatcagcctcagcccctattcttggtcttattgataacagaacactgaataatggttcctaatctgagcaaatttcaggatgatctttttccctgtgtgtctgtgatatcttggtatctggctgatccctgcctccatgggggctgtgggagaggcaggcaggttccgaaggtcaactctgagcgggctggcaaggc

SEQ ID NO: 432 - DNA, 495 bp, Artificial Sequence
  source: /note="Description of Artificial Sequence: Synthetic polynucleotide"
gcctccctcgcgccatcagcgttacttggtcaactctggattccagcccctttttgcaagttcccagctgtccagccttgacttactcacctacaacagtgagccaacttccctctccaaaatatatggtgtttcgtcgaccgttacttggtcaacttcactgccacagaggtacagaggtctggctggtgctagtagactccagggttgagggaaaatgcttgagtttgtttccagagacattgtacccttccttggcaccgcctttggtcatgctgccaatactacctgaataatggatcagcctcagcccctattcttggtcttattgataacagaacactgaataatggttcctaatctgagcaaatttcaggatgatctttttccctgtgtgtctgtgatatcttggtatctggctgatccctgcctccatgggggctgtgggagaggcaggcagcgttacttggtcaactctgagcgggctggcaaggc

SEQ ID NO: 433 - DNA, 495 bp, Artificial Sequence
  source: /note="Description of Artificial Sequence: Synthetic polynucleotide"
gcctccctcgcgccatcagtaggagacggtcaactctcctggaactccgaccttatgatacactatcccgaaagaagtcttttacatacccaagacagagagctgggttccactgccaaaaaacagtttttcattgtcgactaggagacggtcaacttcactgccacagaggtacagaggtctggctggtgctagtagactccagggttgagggaaaatgcttgagtttgtttccagagacattgtacccttccttggcaccgcctttggtcatgctgccaatactacctgaataatggatcagcctcagcccctattcttggtcttattgataacagaacactgaataatggttcctaatctgagcaaatttcaggatgatctttttccctgtgtgtctgtgatatcttggtatctggctgatccctgcctccatgggggctgtgggagaggcaggcagtaggagacggtcaactctgagcgggctggcaaggc

SEQ ID NO: 434 - DNA, 495 bp, Artificial Sequence
  source: /note="Description of Artificial Sequence: Synthetic polynucleotide"
gcctccctcgcgccatcaggacactctggtcaactagagaactctgccttcaagggacaatggccataccaccctgattctgcaacttacctaggatggagagtcgagtcccatcaccaaaatgctggggctgatgtcgacgacactctggtcaacttcactgccacagaggtacagaggtctggctggtgctagtagactccagggttgagggaaaatgcttgagtttgtttccagagacattgtacccttccttggcaccgcctttggtcatgctgccaatactacctgaataatggatcagcctcagcccctattcttggtcttattgataacagaacactgaataatggttcctaatctgagcaaatttcaggatgatctttttccctgtgtgtctgtgatatcttggtatctggctgatccctgcctccatgggggctgtgggagaggcaggcaggacactctggtcaactctgagcgggctggcaaggc

SEQ ID NO: 435 - DNA, 495 bp, Artificial Sequence
  source: /note="Description of Artificial Sequence: Synthetic polynucleotide"
gcctccctcgcgccatcagttcggaacggtcaactatcattgcagtcaaacccaggcacccccgagtcaagagtggagcccccatacctgtcacagtgagcctggtcccgttcccaaagtggaggggtgaattatgtcgacttcggaacggtcaacttcactgccacagaggtacagaggtctggctggtgctagtagactccagggttgagggaaaatgcttgagtttgtttccagagacattgtacccttccttggcaccgcctttggtcatgctgccaatactacctgaataatggatcagcctcagcccctattcttggtcttattgataacagaacactgaataatggttcctaatctgagcaaatttcaggatgatctttttccctgtgtgtctgtgatatcttggtatctggctgatccctgcctccatgggggctgtgggagaggcaggcagttcggaacggtcaactctgagcgggctggcaaggc

SEQ ID NO: 436 - DNA, 495 bp, Artificial Sequence
  source: /note="Description of Artificial Sequence: Synthetic polynucleotide"
gcctccctcgcgccatcagaagtaacgggtcaactgggtcgtgcaggctgggctgctcaccctctctcccacctggagcccccttcttacctagcacggtgagccgtgtccctggcccgaagaactgctcattgtgtcgacaagtaacgggtcaacttcactgccacagaggtacagaggtctggctggtgctagtagactccagggttgagggaaaatgcttgagtttgtttccagagacattgtacccttccttggcaccgcctttggtcatgctgccaatactacctgaataatggatcagcctcagcccctattcttggtcttattgataacagaacactgaataatggttcctaatctgagcaaatttcaggatgatctttttccctgtgtgtctgtgatatcttggtatctggctgatccctgcctccatgggggctgtgggagaggcaggcagaagtaacgggtcaactctgagcgggctggcaaggc

SEQ ID NO: 437 - DNA, 495 bp, Artificial Sequence
  source: /note="Description of Artificial Sequence: Synthetic polynucleotide"
gcctccctcgcgccatcaggtctcctaggtcaactcctctgcccatcccgccctctcggagctctccggagccccaaccgcctccttacccagtacggtcagcctagagccttctccaaaaaacagctccccggtgtcgacgtctcctaggtcaacttcactgccacagaggtacagaggtctggctggtgctagtagactccagggttgagggaaaatgcttgagtttgtttccagagacattgtacccttccttggcaccgcctttggtcatgctgccaatactacctgaataatggatcagcctcagcccctattcttggtcttattgataacagaacactgaataatggttcctaatctgagcaaatttcaggatgatctttttccctgtgtgtctgtgatatcttggtatctggctgatccctgcctccatgggggctgtgggagaggcaggcaggtctcctaggtcaactctgagcgggctggcaaggc

SEQ ID NO: 438 - DNA, 495 bp, Artificial Sequence
  source: /note="Description of Artificial Sequence: Synthetic polynucleotide"
gcctccctcgcgccatcaggtagacacggtcaactgcgtcccggggcgccccctccccagttccggggcttcagcgggagcccccgcttaccgagcactgtcagccgggtgcctgggccaaaatactgcgtatctgtcgacgtagacacggtcaacttcactgccacagaggtacagaggtctggctggtgctagtagactccagggttgagggaaaatgcttgagtttgtttccagagacattgtacccttccttggcaccgcctttggtcatgctgccaatactacctgaataatggatcagcctcagcccctattcttggtcttattgataacagaacactgaataatggttcctaatctgagcaaatttcaggatgatctttttccctgtgtgtctgtgatatcttggtatctggctgatccctgcctccatgggggctgtgggagaggcaggcaggtagacacggtcaactctgagcgggctggcaaggc

SEQ ID NO: 439 - DNA, 495 bp, Artificial Sequence
  source: /note="Description of Artificial Sequence: Synthetic polynucleotide"
gcctccctcgcgccatcagcactgtacggtcaactcgcacaaaaacccgagcgcagtctcgtccccggtcccccggcggccccagcttacccagcactgagagccgggtcccggcgccgaagtactgaatgttttgtcgaccactgtacggtcaacttcactgccacagaggtacagaggtctggctggtgctagtagactccagggttgagggaaaatgcttgagtttgtttccagagacattgtacccttccttggcaccgcctttggtcatgctgccaatactacctgaataatggatcagcctcagcccctattcttggtcttattgataacagaacactgaataatggttcctaatctgagcaaatttcaggatgatctttttccctgtgtgtctgtgatatcttggtatctggctgatccctgcctccatgggggctgtgggagaggcaggcagcactgtacggtcaactctgagcgggctggcaaggc

SEQ ID NO: 440 - DNA, 495 bp, Artificial Sequence
  source: /note="Description of Artificial Sequence: Synthetic polynucleotide"
gcctccctcgcgccatcaggatgatccggtcaactccccgcaaaaaccagacccaagccgcccgcgcccgcgccccagcagcccgcgctcaccgagcaccaggagccgcgtgcctggcccgaagtactgggtctcgtcgacgatgatccggtcaacttcactgccacagaggtacagaggtctggctggtgctagtagactccagggttgagggaaaatgcttgagtttgtttccagagacattgtacccttccttggcaccgcctttggtcatgctgccaatactacctgaataatggatcagcctcagcccctattcttggtcttattgataacagaacactgaataatggttcctaatctgagcaaatttcaggatgatctttttccctgtgtgtctgtgatatcttggtatctggctgatccctgcctccatgggggctgtgggagaggcaggcaggatgatccggtcaactctgagcgggctggcaaggc

SEQ ID NO: 441 - DNA, 495 bp, Artificial Sequence
  source: /note="Description of Artificial Sequence: Synthetic polynucleotide"
gcctccctcgcgccatcagcgccaataggtcaactccgccgccttccacctgaatcccgccgcccgggtggtcccgcgaaaactcacccagcacggtcagcctgctgccggccccgaaagtcaggacgttggcccgtcgaccgccaataggtcaacttcactgccacagaggtacagaggtctggctggtgctagtagactccagggttgagggaaaatgcttgagtttgtttccagagacattgtacccttccttggcaccgcctttggtcatgctgccaatactacctgaataatggatcagcctcagcccctattcttggtcttattgataacagaacactgaataatggttcctaatctgagcaaatttcaggatgatctttttccctgtgtgtctgtgatatcttggtatctggctgatccctgcctccatgggggctgtgggagaggcaggcagcgccaataggtcaactctgagcgggctggcaaggc

SEQ ID NO: 442 - DNA, 495 bp, Artificial Sequence
  source: /note="Description of Artificial Sequence: Synthetic polynucleotide"
gcctccctcgcgccatcagtcaagcctggtcaactccaccctccgactccggggaccgaggggctggaaggtggggagacgcccgaatctcacctgtgaccgtgagcctggtgcccggcccgaagtactgctcgtgtcgactcaagcctggtcaacttcactgccacagaggtacagaggtctggctggtgctagtagactccagggttgagggaaaatgcttgagtttgtttccagagacattgtacccttccttggcaccgcctttggtcatgctgccaatactacctgaataatggatcagcctcagcccctattcttggtcttattgataacagaacactgaataatggttcctaatctgagcaaatttcaggatgatctttttccctgtgtgtctgtgatatcttggtatctggctgatccctgcctccatgggggctgtgggagaggcaggcagtcaagcctggtcaactctgagcgggctggcaaggc

SEQ ID NO: 443 - DNA, 495 bp, Artificial Sequence
  source: /note="Description of Artificial Sequence: Synthetic polynucleotide"
gcctccctcgcgccatcagagagtgtctacgtacgctgtggacccacttttccctgtgacggatctgcaaaagaacctgaaaaatgtcttacctacaactgtgagtctggtgccttgtccaaagaaagcttcagtgtcgacagagtgtctacgtacgtcactgccacagtggtacagataggtctggctggtgctggtggatgccaggattggggaaatgctcaagcttgtttcaagaaacacagtacccctctgtgacatcaactttggtcctgctgtgaccactgcctgaatagtggataagcttcagcccccgtcttgggtcctgtcgatatcagaacactgttcctaacctgagcacattccaggatcatctctttcttctgtacaatgtgatatcttggcatctgggtgatcccagcatcaatagagcctgctggagaggcagacagaaagtgaaagagtgtctacgtacgctgagcgggctggcaaggc

SEQ ID NO: 444 - DNA, 495 bp, Artificial Sequence
  source: /note="Description of Artificial Sequence: Synthetic polynucleotide"
gcctccctcgcgccatcaggttccgaatacgtacgatttcccaggacagagtcctccctcatcgcacccctcctagagacccccagccttacctacaacggttaacctggtccccgaaccgaaggtgtagccatagtcgacgttccgaatacgtacgtcactgccacagtggtacagataggtctggctggtgctggtggatgccaggattggggaaatgctcaagcttgtttcaagaaacacagtacccctctgtgacatcaactttggtcctgctgtgaccactgcctgaatagtggataagcttcagcccccgtcttgggtcctgtcgatatcagaacactgttcctaacctgagcacattccaggatcatctctttcttctgtacaatgtgatatcttggcatctgggtgatcccagcatcaatagagcctgctggagaggcagacagaaagtgaagttccgaatacgtacgctgagcgggctggcaaggc

SEQ ID NO: 445 - DNA, 495 bp, Artificial Sequence
  source: /note="Description of Artificial Sequence: Synthetic polynucleotide"
gcctccctcgcgccatcagcgttactttacgtacgctggattccagcccctttttgcaagttcccagctgtccagccttgacttactcacctacaacagtgagccaacttccctctccaaaatatatggtgtttcgtcgaccgttactttacgtacgtcactgccacagtggtacagataggtctggctggtgctggtggatgccaggattggggaaatgctcaagcttgtttcaagaaacacagtacccctctgtgacatcaactttggtcctgctgtgaccactgcctgaatagtggataagcttcagcccccgtcttgggtcctgtcgatatcagaacactgttcctaacctgagcacattccaggatcatctctttcttctgtacaatgtgatatcttggcatctgggtgatcccagcatcaatagagcctgctggagaggcagacagaaagtgaacgttactttacgtacgctgagcgggctggcaaggc

SEQ ID NO: 446 - DNA, 495 bp, Artificial Sequence
  source: /note="Description of Artificial Sequence: Synthetic polynucleotide"
gcctccctcgcgccatcagtaggagactacgtacgctcctggaactccgaccttatgatacactatcccgaaagaagtcttttacatacccaagacagagagctgggttccactgccaaaaaacagtttttcattgtcgactaggagactacgtacgtcactgccacagtggtacagataggtctggctggtgctggtggatgccaggattggggaaatgctcaagcttgtttcaagaaacacagtacccctctgtgacatcaactttggtcctgctgtgaccactgcctgaatagtggataagcttcagcccccgtcttgggtcctgtcgatatcagaacactgttcctaacctgagcacattccaggatcatctctttcttctgtacaatgtgatatcttggcatctgggtgatcccagcatcaatagagcctgctggagaggcagacagaaagtgaataggagactacgtacgctgagcgggctggcaaggc

SEQ ID NO: 447 - DNA, 495 bp, Artificial Sequence
  source: /note="Description of Artificial Sequence: Synthetic polynucleotide"
gcctccctcgcgccatcaggacactcttacgtacgagagaactctgccttcaagggacaatggccataccaccctgattctgcaacttacctaggatggagagtcgagtcccatcaccaaaatgctggggctgatgtcgacgacactcttacgtacgtcactgccacagtggtacagataggtctggctggtgctggtggatgccaggattggggaaatgctcaagcttgtttcaagaaacacagtacccctctgtgacatcaactttggtcctgctgtgaccactgcctgaatagtggataagcttcagcccccgtcttgggtcctgtcgatatcagaacactgttcctaacctgagcacattccaggatcatctctttcttctgtacaatgtgatatcttggcatctgggtgatcccagcatcaatagagcctgctggagaggcagacagaaagtgaagacactcttacgtacgctgagcgggctggcaaggc

SEQ ID NO: 448 - DNA, 495 bp, Artificial Sequence
  source: /note="Description of Artificial Sequence: Synthetic polynucleotide"
gcctccctcgcgccatcagttcggaactacgtacgatcattgcagtcaaacccaggcacccccgagtcaagagtggagcccccatacctgtcacagtgagcctggtcccgttcccaaagtggaggggtgaattatgtcgacttcggaactacgtacgtcactgccacagtggtacagataggtctggctggtgctggtggatgccaggattggggaaatgctcaagcttgtttcaagaaacacagtacccctctgtgacatcaactttggtcctgctgtgaccactgcctgaatagtggataagcttcagcccccgtcttgggtcctgtcgatatcagaacactgttcctaacctgagcacattccaggatcatctctttcttctgtacaatgtgatatcttggcatctgggtgatcccagcatcaatagagcctgctggagaggcagacagaaagtgaattcggaactacgtacgctgagcgggctggcaaggc

SEQ ID NO: 449 - DNA, 495 bp, Artificial Sequence
  source: /note="Description of Artificial Sequence: Synthetic polynucleotide"
gcctccctcgcgccatcagaagtaacgtacgtacggggtcgtgcaggctgggctgctcaccctctctcccacctggagcccccttcttacctagcacggtgagccgtgtccctggcccgaagaactgctcattgtgtcgacaagtaacgtacgtacgtcactgccacagtggtacagataggtctggctggtgctggtggatgccaggattggggaaatgctcaagcttgtttcaagaaacacagtacccctctgtgacatcaactttggtcctgctgtgaccactgcctgaatagtggataagcttcagcccccgtcttgggtcctgtcgatatcagaacactgttcctaacctgagcacattccaggatcatctctttcttctgtacaatgtgatatcttggcatctgggtgatcccagcatcaatagagcctgctggagaggcagacagaaagtgaaaagtaacgtacgtacgctgagcgggctggcaaggc

SEQ ID NO: 450 - DNA, 495 bp, Artificial Sequence
  source: /note="Description of Artificial Sequence: Synthetic polynucleotide"
gcctccctcgcgccatcaggtctcctatacgtacgcctctgcccatcccgccctctcggagctctccggagccccaaccgcctccttacccagtacggtcagcctagagccttctccaaaaaacagctccccggtgtcgacgtctcctatacgtacgtcactgccacagtggtacagataggtctggctggtgctggtggatgccaggattggggaaatgctcaagcttgtttcaagaaacacagtacccctctgtgacatcaactttggtcctgctgtgaccactgcctgaatagtggataagcttcagcccccgtcttgggtcctgtcgatatcagaacactgttcctaacctgagcacattccaggatcatctctttcttctgtacaatgtgatatcttggcatctgggtgatcccagcatcaatagagcctgctggagaggcagacagaaagtgaagtctcctatacgtacgctgagcgggctggcaaggc

SEQ ID NO: 451 - DNA, 495 bp, Artificial Sequence
  source: /note="Description of Artificial Sequence: Synthetic polynucleotide"
gcctccctcgcgccatcaggtagacactacgtacggcgtcccggggcgccccctccccagttccggggcttcagcgggagcccccgcttaccgagcactgtcagccgggtgcctgggccaaaatactgcgtatctgtcgacgtagacactacgtacgtcactgccacagtggtacagataggtctggctggtgctggtggatgccaggattggggaaatgctcaagcttgtttcaagaaacacagtacccctctgtgacatcaactttggtcctgctgtgaccactgcctgaatagtggataagcttcagcccccgtcttgggtcctgtcgatatcagaacactgttcctaacctgagcacattccaggatcatctctttcttctgtacaatgtgatatcttggcatctgggtgatcccagcatcaatagagcctgctggagaggcagacagaaagtgaagtagacactacgtacgctgagcgggctggcaaggc

SEQ ID NO: 452 - DNA, 495 bp, Artificial Sequence
  source: /note="Description of Artificial Sequence: Synthetic polynucleotide"
gcctccctcgcgccatcagcactgtactacgtacgcgcacaaaaacccgagcgcagtctcgtccccggtcccccggcggccccagcttacccagcactgagagccgggtcccggcgccgaagtactgaatgttttgtcgaccactgtactacgtacgtcactgccacagtggtacagataggtctggctggtgctggtggatgccaggattggggaaatgctcaagcttgtttcaagaaacacagtacccctctgtgacatcaactttggtcctgctgtgaccactgcctgaatagtggataagcttcagcccccgtcttgggtcctgtcgatatcagaacactgttcctaacctgagcacattccaggatcatctctttcttctgtacaatgtgatatcttggcatctgggtgatcccagcatcaatagagcctgctggagaggcagacagaaagtgaacactgtactacgtacgctgagcgggctggcaaggc

SEQ ID NO: 453 - DNA, 495 bp, Artificial Sequence
  source: /note="Description of Artificial Sequence: Synthetic polynucleotide"
gcctccctcgcgccatcaggatgatcctacgtacgccccgcaaaaaccagacccaagccgcccgcgcccgcgccccagcagcccgcgctcaccgagcaccaggagccgcgtgcctggcccgaagtactgggtctcgtcgacgatgatcctacgtacgtcactgccacagtggtacagataggtctggctggtgctggtggatgccaggattggggaaatgctcaagcttgtttcaagaaacacagtacccctctgtgacatcaactttggtcctgctgtgaccactgcctgaatagtggataagcttcagcccccgtcttgggtcctgtcgatatcagaacactgttcctaacctgagcacattccaggatcatctctttcttctgtacaatgtgatatcttggcatctgggtgatcccagcatcaatagagcctgctggagaggcagacagaaagtgaagatgatcctacgtacgctgagcgggctggcaaggc

SEQ ID NO: 454 - DNA, 495 bp, Artificial Sequence
  source: /note="Description of Artificial Sequence: Synthetic polynucleotide"
gcctccctcgcgccatcagcgccaatatacgtacgccgccgccttccacctgaatcccgccgcccgggtggtcccgcgaaaactcacccagcacggtcagcctgctgccggccccgaaagtcaggacgttggcccgtcgaccgccaatatacgtacgtcactgccacagtggtacagataggtctggctggtgctggtggatgccaggattggggaaatgctcaagcttgtttcaagaaacacagtacccctctgtgacatcaactttggtcctgctgtgaccactgcctgaatagtggataagcttcagcccccgtcttgggtcctgtcgatatcagaacactgttcctaacctgagcacattccaggatcatctctttcttctgtacaatgtgatatcttggcatctgggtgatcccagcatcaatagagcctgctggagaggcagacagaaagtgaacgccaatatacgtacgctgagcgggctggcaaggc

SEQ ID NO: 455 - DNA, 495 bp, Artificial Sequence
  source: /note="Description of Artificial Sequence: Synthetic polynucleotide"
gcctccctcgcgccatcagtcaagccttacgtacgccaccctccgactccggggaccgaggggctggaaggtggggagacgcccgaatctcacctgtgaccgtgagcctggtgcccggcccgaagtactgctcgtgtcgactcaagccttacgtacgtcactgccacagtggtacagataggtctggctggtgctggtggatgccaggattggggaaatgctcaagcttgtttcaagaaacacagtacccctctgtgacatcaactttggtcctgctgtgaccactgcctgaatagtggataagcttcagcccccgtcttgggtcctgtcgatatcagaacactgttcctaacctgagcacattccaggatcatctctttcttctgtacaatgtgatatcttggcatctgggtgatcccagcatcaatagagcctgctggagaggcagacagaaagtgaatcaagccttacgtacgctgagcgggctggcaaggc

SEQ ID NO: 456 - DNA, 495 bp, Artificial Sequence
  source: /note="Description of Artificial Sequence: Synthetic polynucleotide"
gcctccctcgcgccatcagagagtgtcagtaccgactgtggacccacttttccctgtgacggatctgcaaaagaacctgaaaaatgtcttacctacaactgtgagtctggtgccttgtccaaagaaagcttcagtgtcgacagagtgtcagtaccgatcatgctggcacagaaatacaaagctgagtcccccagctccagagagctcaggtttagttcagagtgcaagtcagggaactgttgtgcggagaatcgttcaagaatgtttccttttgctctctcttctccattataatactgaatgaggaactggaggccctggtccaggctctgttggtaccagtacacagagaggtctccagacctaggggagcatctcagcgtcactcgctgtccagttgctgtgatcaggtgctttggggtttgtgtgactccagaatccactgggcctgtgtgtcagaagagtgtcagtaccgactgagcgggctggcaaggc

SEQ ID NO: 457 - DNA, 495 bp, Artificial Sequence
  source: /note="Description of Artificial Sequence: Synthetic polynucleotide"
gcctccctcgcgccatcaggttccgaaagtaccgaatttcccaggacagagtcctccctcatcgcacccctcctagagacccccagccttacctacaacggttaacctggtccccgaaccgaaggtgtagccatagtcgacgttccgaaagtaccgatcatgctggcacagaaatacaaagctgagtcccccagctccagagagctcaggtttagttcagagtgcaagtcagggaactgttgtgcggagaatcgttcaagaatgtttccttttgctctctcttctccattataatactgaatgaggaactggaggccctggtccaggctctgttggtaccagtacacagagaggtctccagacctaggggagcatctcagcgtcactcgctgtccagttgctgtgatcaggtgctttggggtttgtgtgactccagaatccactgggcctgtgtgtcagagttccgaaagtaccgactgagcgggctggcaaggc

SEQ ID NO: 458 - DNA, 495 bp, Artificial Sequence
  source: /note="Description of Artificial Sequence: Synthetic polynucleotide"
gcctccctcgcgccatcagcgttacttagtaccgactggattccagcccctttttgcaagttcccagctgtccagccttgacttactcacctacaacagtgagccaacttccctctccaaaatatatggtgtttcgtcgaccgttacttagtaccgatcatgctggcacagaaatacaaagctgagtcccccagctccagagagctcaggtttagttcagagtgcaagtcagggaactgttgtgcggagaatcgttcaagaatgtttccttttgctctctcttctccattataatactgaatgaggaactggaggccctggtccaggctctgttggtaccagtacacagagaggtctccagacctaggggagcatctcagcgtcactcgctgtccagttgctgtgatcaggtgctttggggtttgtgtgactccagaatccactgggcctgtgtgtcagacgttacttagtaccgactgagcgggctggcaaggc

SEQ ID NO: 459 - DNA, 495 bp, Artificial Sequence
  source: /note="Description of Artificial Sequence: Synthetic polynucleotide"
gcctccctcgcgccatcagtaggagacagtaccgactcctggaactccgaccttatgatacactatcccgaaagaagtcttttacatacccaagacagagagctgggttccactgccaaaaaacagtttttcattgtcgactaggagacagtaccgatcatgctggcacagaaatacaaagctgagtcccccagctccagagagctcaggtttagttcagagtgcaagtcagggaactgttgtgcggagaatcgttcaagaatgtttccttttgctctctcttctccattataatactgaatgaggaactggaggccctggtccaggctctgttggtaccagtacacagagaggtctccagacctaggggagcatctcagcgtcactcgctgtccagttgctgtgatcaggtgctttggggtttgtgtgactccagaatccactgggcctgtgtgtcagataggagacagtaccgactgagcgggctggcaaggc

SEQ ID NO: 460 - DNA, 495 bp, Artificial Sequence
  source: /note="Description of Artificial Sequence: Synthetic polynucleotide"
gcctccctcgcgccatcaggacactctagtaccgaagagaactctgccttcaagggacaatggccataccaccctgattctgcaacttacctaggatggagagtcgagtcccatcaccaaaatgctggggctgatgtcgacgacactctagtaccgatcatgctggcacagaaatacaaagctgagtcccccagctccagagagctcaggtttagttcagagtgcaagtcagggaactgttgtgcggagaatcgttcaagaatgtttccttttgctctctcttctccattataatactgaatgaggaactggaggccctggtccaggctctgttggtaccagtacacagagaggtctccagacctaggggagcatctcagcgtcactcgctgtccagttgctgtgatcaggtgctttggggtttgtgtgactccagaatccactgggcctgtgtgtcagagacactctagtaccgactgagcgggctggcaaggc

SEQ ID NO: 461 - DNA, 495 bp, Artificial Sequence
  source: /note="Description of Artificial Sequence: Synthetic polynucleotide"
gcctccctcgcgccatcagttcggaacagtaccgaatcattgcagtcaaacccaggcacccccgagtcaagagtggagcccccatacctgtcacagtgagcctggtcccgttcccaaagtggaggggtgaattatgtcgacttcggaacagtaccgatcatgctggcacagaaatacaaagctgagtcccccagctccagagagctcaggtttagttcagagtgcaagtcagggaactgttgtgcggagaatcgttcaagaatgtttccttttgctctctcttctccattataatactgaatgaggaactggaggccctggtccaggctctgttggtaccagtacacagagaggtctccagacctaggggagcatctcagcgtcactcgctgtccagttgctgtgatcaggtgctttggggtttgtgtgactccagaatccactgggcctgtgtgtcagattcggaacagtaccgactgagcgggctggcaaggc

SEQ ID NO: 462 - DNA, 495 bp, Artificial Sequence
  source: /note="Description of Artificial Sequence: Synthetic polynucleotide"
gcctccctcgcgccatcagaagtaacgagtaccgagggtcgtgcaggctgggctgctcaccctctctcccacctggagcccccttcttacctagcacggtgagccgtgtccctggcccgaagaactgctcattgtgtcgacaagtaacgagtaccgatcatgctggcacagaaatacaaagctgagtcccccagctccagagagctcaggtttagttcagagtgcaagtcagggaactgttgtgcggagaatcgttcaagaatgtttccttttgctctctcttctccattataatactgaatgaggaactggaggccctggtccaggctctgttggtaccagtacacagagaggtctccagacctaggggagcatctcagcgtcactcgctgtccagttgctgtgatcaggtgctttggggtttgtgtgactccagaatccactgggcctgtgtgtcagaaagtaacgagtaccgactgagcgggctggcaaggc

SEQ ID NO: 463 - DNA, 495 bp, Artificial Sequence
  source: /note="Description of Artificial Sequence: Synthetic polynucleotide"
gcctccctcgcgccatcaggtctcctaagtaccgacctctgcccatcccgccctctcggagctctccggagccccaaccgcctccttacccagtacggtcagcctagagccttctccaaaaaacagctccccggtgtcgacgtctcctaagtaccgatcatgctggcacagaaatacaaagctgagtcccccagctccagagagctcaggtttagttcagagtgcaagtcagggaactgttgtgcggagaatcgttcaagaatgtttccttttgctctctcttctccattataatactgaatgaggaactggaggccctggtccaggctctgttggtaccagtacacagagaggtctccagacctaggggagcatctcagcgtcactcgctgtccagttgctgtgatcaggtgctttggggtttgtgtgactccagaatccactgggcctgtgtgtcagagtctcctaagtaccgactgagcgggctggcaaggc

SEQ ID NO: 464 - DNA, 495 bp, Artificial Sequence
  source: /note="Description of Artificial Sequence: Synthetic polynucleotide"
gcctccctcgcgccatcaggtagacacagtaccgagcgtcccggggcgccccctccccagttccggggcttcagcgggagcccccgcttaccgagcactgtcagccgggtgcctgggccaaaatactgcgtatctgtcgacgtagacacagtaccgatcatgctggcacagaaatacaaagctgagtcccccagctccagagagctcaggtttagttcagagtgcaagtcagggaactgttgtgcggagaatcgttcaagaatgtttccttttgctctctcttctccattataatactgaatgaggaactggaggccctggtccaggctctgttggtaccagtacacagagaggtctccagacctaggggagcatctcagcgtcactcgctgtccagttgctgtgatcaggtgctttggggtttgtgtgactccagaatccactgggcctgtgtgtcagagtagacacagtaccgactgagcgggctggcaaggc

SEQ ID NO: 465 - DNA, 495 bp, Artificial Sequence
  source: /note="Description of Artificial Sequence: Synthetic polynucleotide"
gcctccctcgcgccatcagcactgtacagtaccgacgcacaaaaacccgagcgcagtctcgtccccggtcccccggcggccccagcttacccagcactgagagccgggtcccggcgccgaagtactgaatgttttgtcgaccactgtacagtaccgatcatgctggcacagaaatacaaagctgagtcccccagctccagagagctcaggtttagttcagagtgcaagtcagggaactgttgtgcggagaatcgttcaagaatgtttccttttgctctctcttctccattataatactgaatgaggaactggaggccctggtccaggctctgttggtaccagtacacagagaggtctccagacctaggggagcatctcagcgtcactcgctgtccagttgctgtgatcaggtgctttggggtttgtgtgactccagaatccactgggcctgtgtgtcagacactgtacagtaccgactgagcgggctggcaaggc

SEQ ID NO: 466 - DNA, 495 bp, Artificial Sequence
  source: /note="Description of Artificial Sequence: Synthetic polynucleotide"
gcctccctcgcgccatcaggatgatccagtaccgaccccgcaaaaaccagacccaagccgcccgcgcccgcgccccagcagcccgcgctcaccgagcaccaggagccgcgtgcctggcccgaagtactgggtctcgtcgacgatgatccagtaccgatcatgctggcacagaaatacaaagctgagtcccccagctccagagagctcaggtttagttcagagtgcaagtcagggaactgttgtgcggagaatcgttcaagaatgtttccttttgctctctcttctccattataatactgaatgaggaactggaggccctggtccaggctctgttggtaccagtacacagagaggtctccagacctaggggagcatctcagcgtcactcgctgtccagttgctgtgatcaggtgctttggggtttgtgtgactccagaatccactgggcctgtgtgtcagagatgatccagtaccgactgagcgggctggcaaggc

SEQ ID NO: 467 - DNA, 495 bp, Artificial Sequence
  source: /note="Description of Artificial Sequence: Synthetic polynucleotide"
gcctccctcgcgccatcagcgccaataagtaccgaccgccgccttccacctgaatcccgccgcccgggtggtcccgcgaaaactcacccagcacggtcagcctgctgccggccccgaaagtcaggacgttggcccgtcgaccgccaataagtaccgatcatgctggcacagaaatacaaagctgagtcccccagctccagagagctcaggtttagttcagagtgcaagtcagggaactgttgtgcggagaatcgttcaagaatgtttccttttgctctctcttctccattataatactgaatgaggaactggaggccctggtccaggctctgttggtaccagtacacagagaggtctccagacctaggggagcatctcagcgtcactcgctgtccagttgctgtgatcaggtgctttggggtttgtgtgactccagaatccactgggcctgtgtgtcagacgccaataagtaccgactgagcgggctggcaaggc

SEQ ID NO: 468 - DNA, 495 bp, Artificial Sequence
  source: /note="Description of Artificial Sequence: Synthetic polynucleotide"
gcctccctcgcgccatcagtcaagcctagtaccgaccaccctccgactccggggaccgaggggctggaaggtggggagacgcccgaatctcacctgtgaccgtgagcctggtgcccggcccgaagtactgctcgtgtcgactcaagcctagtaccgatcatgctggcacagaaatacaaagctgagtcccccagctccagagagctcaggtttagttcagagtgcaagtcagggaactgttgtgcggagaatcgttcaagaatgtttccttttgctctctcttctccattataatactgaatgaggaactggaggccctggtccaggctctgttggtaccagtacacagagaggtctccagacctaggggagcatctcagcgtcactcgctgtccagttgctgtgatcaggtgctttggggtttgtgtgactccagaatccactgggcctgtgtgtcagatcaagcctagtaccgactgagcgggctggcaaggc

SEQ ID NO: 469 - DNA, 495 bp, Artificial Sequence
  source: /note="Description of Artificial Sequence: Synthetic polynucleotide"
gcctccctcgcgccatcagagagtgtcatccatggctgtggacccacttttccctgtgacggatctgcaaaagaacctgaaaaatgtcttacctacaactgtgagtctggtgccttgtccaaagaaagcttcagtgtcgacagagtgtcatccatggtcactgctggcgcagaaatatacagatgtctgggaggaggcagcagactccagagtgagggggaggtcctctgtgtttgatctagagacactgtagccatctgagacttctcctttgttagtgtcttgaacaccatatgagtaatggatcagcctcagcccatgtcccaggtcttgtcgataccagaacatattgttgtggttccaagtctggtgacacgccaaggtcacctgccttcctgtctctgtgatcttgtgtcttgggctctgggtgatttcagcatccctgtgtcctgtaatagagagagtgtcatccatggctgagcgggctggcaaggc

SEQ ID NO: 470 - DNA, 495 bp, Artificial Sequence
  source: /note="Description of Artificial Sequence: Synthetic polynucleotide"
gcctccctcgcgccatcaggttccgaaatccatggatttcccaggacagagtcctccctcatcgcacccctcctagagacccccagccttacctacaacggttaacctggtccccgaaccgaaggtgtagccatagtcgacgttccgaaatccatggtcactgctggcgcagaaatatacagatgtctgggaggaggcagcagactccagagtgagggggaggtcctctgtgtttgatctagagacactgtagccatctgagacttctcctttgttagtgtcttgaacaccatatgagtaatggatcagcctcagcccatgtcccaggtcttgtcgataccagaacatattgttgtggttccaagtctggtgacacgccaaggtcacctgccttcctgtctctgtgatcttgtgtcttgggctctgggtgatttcagcatccctgtgtcctgtaatagaggttccgaaatccatggctgagcgggctggcaaggc

SEQ ID NO: 471 - DNA, 495 bp, Artificial Sequence
  source: /note="Description of Artificial Sequence: Synthetic polynucleotide"
gcctccctcgcgccatcagcgttacttatccatggctggattccagcccctttttgcaagttcccagctgtccagccttgacttactcacctacaacagtgagccaacttccctctccaaaatatatggtgtttcgtcgaccgttacttatccatggtcactgctggcgcagaaatatacagatgtctgggaggaggcagcagactccagagtgagggggaggtcctctgtgtttgatctagagacactgtagccatctgagacttctcctttgttagtgtcttgaacaccatatgagtaatggatcagcctcagcccatgtcccaggtcttgtcgataccagaacatattgttgtggttccaagtctggtgacacgccaaggtcacctgccttcctgtctctgtgatcttgtgtcttgggctctgggtgatttcagcatccctgtgtcctgtaatagagcgttacttatccatggctgagcgggctggcaaggc

SEQ ID NO: 472 - DNA, 495 bp, Artificial Sequence
  source: /note="Description of Artificial Sequence: Synthetic polynucleotide"
gcctccctcgcgccatcagtaggagacatccatggctcctggaactccgaccttatgatacactatcccgaaagaagtcttttacatacccaagacagagagctgggttccactgccaaaaaacagtttttcattgtcgactaggagacatccatggtcactgctggcgcagaaatatacagatgtctgggaggaggcagcagactccagagtgagggggaggtcctctgtgtttgatctagagacactgtagccatctgagacttctcctttgttagtgtcttgaacaccatatgagtaatggatcagcctcagcccatgtcccaggtcttgtcgataccagaacatattgttgtggttccaagtctggtgacacgccaaggtcacctgccttcctgtctctgtgatcttgtgtcttgggctctgggtgatttcagcatccctgtgtcctgtaatagagtaggagacatccatggctgagcgggctggcaaggc

SEQ ID NO: 473 - DNA, 495 bp, Artificial Sequence
  source: /note="Description of Artificial Sequence: Synthetic polynucleotide"
gcctccctcgcgccatcaggacactctatccatggagagaactctgccttcaagggacaatggccataccaccctgattctgcaacttacctaggatggagagtcgagtcccatcaccaaaatgctggggctgatgtcgacgacactctatccatggtcactgctggcgcagaaatatacagatgtctgggaggaggcagcagactccagagtgagggggaggtcctctgtgtttgatctagagacactgtagccatctgagacttctcctttgttagtgtcttgaacaccatatgagtaatggatcagcctcagcccatgtcccaggtcttgtcgataccagaacatattgttgtggttccaagtctggtgacacgccaaggtcacctgccttcctgtctctgtgatcttgtgtcttgggctctgggtgatttcagcatccctgtgtcctgtaatagaggacactctatccatggctgagcgggctggcaaggc

SEQ ID NO: 474 - DNA, 495 bp, Artificial Sequence
  source: /note="Description of Artificial Sequence: Synthetic polynucleotide"
gcctccctcgcgccatcagttcggaacatccatggatcattgcagtcaaacccaggcacccccgagtcaagagtggagcccccatacctgtcacagtgagcctggtcccgttcccaaagtggaggggtgaattatgtcgacttcggaacatccatggtcactgctggcgcagaaatatacagatgtctgggaggaggcagcagactccagagtgagggggaggtcctctgtgtttgatctagagacactgtagccatctgagacttctcctttgttagtgtcttgaacaccatatgagtaatggatcagcctcagcccatgtcccaggtcttgtcgataccagaacatattgttgtggttccaagtctggtgacacgccaaggtcacctgccttcctgtctctgtgatcttgtgtcttgggctctgggtgatttcagcatccctgtgtcctgtaatagagttcggaacatccatggctgagcgggctggcaaggc

SEQ ID NO: 475 - DNA, 495 bp, Artificial Sequence
  source: /note="Description of Artificial Sequence: Synthetic polynucleotide"
gcctccctcgcgccatcagaagtaacgatccatgggggtcgtgcaggctgggctgctcaccctctctcccacctggagcccccttcttacctagcacggtgagccgtgtccctggcccgaagaactgctcattgtgtcgacaagtaacgatccatggtcactgctggcgcagaaatatacagatgtctgggaggaggcagcagactccagagtgagggggaggtcctctgtgtttgatctagagacactgtagccatctgagacttctcctttgttagtgtcttgaacaccatatgagtaatggatcagcctcagcccatgtcccaggtcttgtcgataccagaacatattgttgtggttccaagtctggtgacacgccaaggtcacctgccttcctgtctctgtgatcttgtgtcttgggctctgggtgatttcagcatccctgtgtcctgtaatagagaagtaacgatccatggctgagcgggctggcaaggc

SEQ ID NO: 476 - DNA, 495 bp, Artificial Sequence
  source: /note="Description of Artificial Sequence: Synthetic polynucleotide"
gcctccctcgcgccatcaggtctcctaatccatggcctctgcccatcccgccctctcggagctctccggagccccaaccgcctccttacccagtacggtcagcctagagccttctccaaaaaacagctccccggtgtcgacgtctcctaatccatggtcactgctggcgcagaaatatacagatgtctgggaggaggcagcagactccagagtgagggggaggtcctctgtgtttgatctagagacactgtagccatctgagacttctcctttgttagtgtcttgaacaccatatgagtaatggatcagcctcagcccatgtcccaggtcttgtcgataccagaacatattgttgtggttccaagtctggtgacacgccaaggtcacctgccttcctgtctctgtgatcttgtgtcttgggctctgggtgatttcagcatccctgtgtcctgtaatagaggtctcctaatccatggctgagcgggctggcaaggc

SEQ ID NO: 477 - DNA, 495 bp, Artificial Sequence
  source: /note="Description of Artificial Sequence: Synthetic polynucleotide"
gcctccctcgcgccatcaggtagacacatccatgggcgtcccggggcgccccctccccagttccggggcttcagcgggagcccccgcttaccgagcactgtcagccgggtgcctgggccaaaatactgcgtatctgtcgacgtagacacatccatggtcactgctggcgcagaaatatacagatgtctgggaggaggcagcagactccagagtgagggggaggtcctctgtgtttgatctagagacactgtagccatctgagacttctcctttgttagtgtcttgaacaccatatgagtaatggatcagcctcagcccatgtcccaggtcttgtcgataccagaacatattgttgtggttccaagtctggtgacacgccaaggtcacctgccttcctgtctctgtgatcttgtgtcttgggctctgggtgatttcagcatccctgtgtcctgtaatagaggtagacacatccatggctgagcgggctggcaaggc

SEQ ID NO: 478 - DNA, 495 bp, Artificial Sequence
  source: /note="Description of Artificial Sequence: Synthetic polynucleotide"
gcctccctcgcgccatcagcactgtacatccatggcgcacaaaaacccgagcgcagtctcgtccccggtcccccggcggccccagcttacccagcactgagagccgggtcccggcgccgaagtactgaatgttttgtcgaccactgtacatccatggtcactgctggcgcagaaatatacagatgtctgggaggaggcagcagactccagagtgagggggaggtcctctgtgtttgatctagagacactgtagccatctgagacttctcctttgttagtgtcttgaacaccatatgagtaatggatcagcctcagcccatgtcccaggtcttgtcgataccagaacatattgttgtggttccaagtctggtgacacgccaaggtcacctgccttcctgtctctgtgatcttgtgtcttgggctctgggtgatttcagcatccctgtgtcctgtaatagagcactgtacatccatggctgagcgggctggcaaggc

SEQ ID NO: 479 - DNA, 495 bp, Artificial Sequence
  source: /note="Description of Artificial Sequence: Synthetic polynucleotide"
gcctccctcgcgccatcaggatgatccatccatggccccgcaaaaaccagacccaagccgcccgcgcccgcgccccagcagcccgcgctcaccgagcaccaggagccgcgtgcctggcccgaagtactgggtctcgtcgacgatgatccatccatggtcactgctggcgcagaaatatacagatgtctgggaggaggcagcagactccagagtgagggggaggtcctctgtgtttgatctagagacactgtagccatctgagacttctcctttgttagtgtcttgaacaccatatgagtaatggatcagcctcagcccatgtcccaggtcttgtcgataccagaacatattgttgtggttccaagtctggtgacacgccaaggtcacctgccttcctgtctctgtgatcttgtgtcttgggctctgggtgatttcagcatccctgtgtcctgtaatagaggatgatccatccatggctgagcgggctggcaaggc

SEQ ID NO: 480 - DNA, 495 bp, Artificial Sequence
  source: /note="Description of Artificial Sequence: Synthetic polynucleotide"
gcctccctcgcgccatcagcgccaataatccatggccgccgccttccacctgaatcccgccgcccgggtggtcccgcgaaaactcacccagcacggtcagcctgctgccggccccgaaagtcaggacgttggcccgtcgaccgccaataatccatggtcactgctggcgcagaaatatacagatgtctgggaggaggcagcagactccagagtgagggggaggtcctctgtgtttgatctagagacactgtagccatctgagacttctcctttgttagtgtcttgaacaccatatgagtaatggatcagcctcagcccatgtcccaggtcttgtcgataccagaacatattgttgtggttccaagtctggtgacacgccaaggtcacctgccttcctgtctctgtgatcttgtgtcttgggctctgggtgatttcagcatccctgtgtcctgtaatagagcgccaataatccatggctgagcgggctggcaaggc

SEQ ID NO: 481 - DNA, 495 bp, Artificial Sequence
  source: /note="Description of Artificial Sequence: Synthetic polynucleotide"
gcctccctcgcgccatcagtcaagcctatccatggccaccctccgactccggggaccgaggggctggaaggtggggagacgcccgaatctcacctgtgaccgtgagcctggtgcccggcccgaagtactgctcgtgtcgactcaagcctatccatggtcactgctggcgcagaaatatacagatgtctgggaggaggcagcagactccagagtgagggggaggtcctctgtgtttgatctagagacactgtagccatctgagacttctcctttgttagtgtcttgaacaccatatgagtaatggatcagcctcagcccatgtcccaggtcttgtcgataccagaacatattgttgtggttccaagtctggtgacacgccaaggtcacctgccttcctgtctctgtgatcttgtgtcttgggctctgggtgatttcagcatccctgtgtcctgtaatagagtcaagcctatccatggctgagcgggctggcaaggc

SEQ ID NO: 482 - DNA, 495 bp, Artificial Sequence
  source: /note="Description of Artificial Sequence: Synthetic polynucleotide"
gcctccctcgcgccatcagagagtgtcgtagcagtctgtggacccacttttccctgtgacggatctgcaaaagaacctgaaaaatgtcttacctacaactgtgagtctggtgccttgtccaaagaaagcttcagtgtcgacagagtgtcgtagcagttcactgctggcgcagaaatacacagatgtctgggagcgggtagctgactccagagtgagggggaaattctctgtcttggatctggagacaacatagccatcggggacttctcctttatctgtaatatcagcagctgctgagtaatagatcagcctcagcccatgtcccaggtcttgtcgataccagaacatatagctgtggctccaagtctggtgacacatcaaggtcacctgccttcctgtctctgtgatcttgtatcttgggctctgggtgattccagcatccctgtgtcctgtaatagagagagtgtcgtagcagtctgagcgggctggcaaggc

SEQ ID NO: 483 - DNA, 495 bp, Artificial Sequence
  source: /note="Description of Artificial Sequence: Synthetic polynucleotide"
gcctccctcgcgccatcaggttccgaagtagcagtatttcccaggacagagtcctccctcatcgcacccctcctagagacccccagccttacctacaacggttaacctggtccccgaaccgaaggtgtagccatagtcgacgttccgaagtagcagttcactgctggcgcagaaatacacagatgtctgggagcgggtagctgactccagagtgagggggaaattctctgtcttggatctggagacaacatagccatcggggacttctcctttatctgtaatatcagcagctgctgagtaatagatcagcctcagcccatgtcccaggtcttgtcgataccagaacatatagctgtggctccaagtctggtgacacatcaaggtcacctgccttcctgtctctgtgatcttgtatcttgggctctgggtgattccagcatccctgtgtcctgtaatagaggttccgaagtagcagtctgagcgggctggcaaggc

SEQ ID NO: 484 - DNA, 495 bp, Artificial Sequence
  source: /note="Description of Artificial Sequence: Synthetic polynucleotide"
gcctccctcgcgccatcagcgttacttgtagcagtctggattccagcccctttttgcaagttcccagctgtccagccttgacttactcacctacaacagtgagccaacttccctctccaaaatatatggtgtttcgtcgaccgttacttgtagcagttcactgctggcgcagaaatacacagatgtctgggagcgggtagctgactccagagtgagggggaaattctctgtcttggatctggagacaacatagccatcggggacttctcctttatctgtaatatcagcagctgctgagtaatagatcagcctcagcccatgtcccaggtcttgtcgataccagaacatatagctgtggctccaagtctggtgacacatcaaggtcacctgccttcctgtctctgtgatcttgtatcttgggctctgggtgattccagcatccctgtgtcctgtaatagagcgttacttgtagcagtctgagcgggctggcaaggc

SEQ ID NO: 485 - DNA, 495 bp, Artificial Sequence
  source: /note="Description of Artificial Sequence: Synthetic polynucleotide"
gcctccctcgcgccatcagtaggagacgtagcagtctcctggaactccgaccttatgatacactatcccgaaagaagtcttttacatacccaagacagagagctgggttccactgccaaaaaacagtttttcattgtcgactaggagacgtagcagttcactgctggcgcagaaatacacagatgtctgggagcgggtagctgactccagagtgagggggaaattctctgtcttggatctggagacaacatagccatcggggacttctcctttatctgtaatatcagcagctgctgagtaatagatcagcctcagcccatgtcccaggtcttgtcgataccagaacatatagctgtggctccaagtctggtgacacatcaaggtcacctgccttcctgtctctgtgatcttgtatcttgggctctgggtgattccagcatccctgtgtcctgtaatagagtaggagacgtagcagtctgagcgggctggcaaggc

SEQ ID NO: 486 - DNA, 495 bp, Artificial Sequence
  source: /note="Description of Artificial Sequence: Synthetic polynucleotide"
gcctccctcgcgccatcaggacactctgtagcagtagagaactctgccttcaagggacaatggccataccaccctgattctgcaacttacctaggatggagagtcgagtcccatcaccaaaatgctggggctgatgtcgacgacactctgtagcagttcactgctggcgcagaaatacacagatgtctgggagcgggtagctgactccagagtgagggggaaattctctgtcttggatctggagacaacatagccatcggggacttctcctttatctgtaatatcagcagctgctgagtaatagatcagcctcagcccatgtcccaggtcttgtcgataccagaacatatagctgtggctccaagtctggtgacacatcaaggtcacctgccttcctgtctctgtgatcttgtatcttgggctctgggtgattccagcatccctgtgtcctgtaatagaggacactctgtagcagtctgagcgggctggcaaggc

SEQ ID NO: 487 - DNA, 495 bp, Artificial Sequence
  source: /note="Description of Artificial Sequence: Synthetic polynucleotide"
gcctccctcgcgccatcagttcggaacgtagcagtatcattgcagtcaaacccaggcacccccgagtcaagagtggagcccccatacctgtcacagtgagcctggtcccgttcccaaagtggaggggtgaattatgtcgacttcggaacgtagcagttcactgctggcgcagaaatacacagatgtctgggagcgggtagctgactccagagtgagggggaaattctctgtcttggatctggagacaacatagccatcggggacttctcctttatctgtaatatcagcagctgctgagtaatagatcagcctcagcccatgtcccaggtcttgtcgataccagaacatatagctgtggctccaagtctggtgacacatcaaggtcacctgccttcctgtctctgtgatcttgtatcttgggctctgggtgattccagcatccctgtgtcctgtaatagagttcggaacgtagcagtctgagcgggctggcaaggc

SEQ ID NO: 488 - DNA, 495 bp, Artificial Sequence
  source: /note="Description of Artificial Sequence: Synthetic polynucleotide"
gcctccctcgcgccatcagaagtaacggtagcagtgggtcgtgcaggctgggctgctcaccctctctcccacctggagcccccttcttacctagcacggtgagccgtgtccctggcccgaagaactgctcattgtgtcgacaagtaacggtagcagttcactgctggcgcagaaatacacagatgtctgggagcgggtagctgactccagagtgagggggaaattctctgtcttggatctggagacaacatagccatcggggacttctcctttatctgtaatatcagcagctgctgagtaatagatcagcctcagcccatgtcccaggtcttgtcgataccagaacatatagctgtggctccaagtctggtgacacatcaaggtcacctgccttcctgtctctgtgatcttgtatcttgggctctgggtgattccagcatccctgtgtcctgtaatagagaagtaacggtagcagtctgagcgggctggcaaggc

SEQ ID NO: 489 - DNA, 495 bp, Artificial Sequence
  source: /note="Description of Artificial Sequence: Synthetic polynucleotide"
gcctccctcgcgccatcaggtctcctagtagcagtcctctgcccatcccgccctctcggagctctccggagccccaaccgcctccttacccagtacggtcagcctagagccttctccaaaaaacagctccccggtgtcgacgtctcctagtagcagttcactgctggcgcagaaatacacagatgtctgggagcgggtagctgactccagagtgagggggaaattctctgtcttggatctggagacaacatagccatcggggacttctcctttatctgtaatatcagcagctgctgagtaatagatcagcctcagcccatgtcccaggtcttgtcgataccagaacatatagctgtggctccaagtctggtgacacatcaaggtcacctgccttcctgtctctgtgatcttgtatcttgggctctgggtgattccagcatccctgtgtcctgtaatagaggtctcctagtagcagtctgagcgggctggcaaggc

SEQ ID NO: 490 - DNA, 495 bp, Artificial Sequence
  source: /note="Description of Artificial Sequence: Synthetic polynucleotide"
gcctccctcgcgccatcaggtagacacgtagcagtgcgtcccggggcgccccctccccagttccggggcttcagcgggagcccccgcttaccgagcactgtcagccgggtgcctgggccaaaatactgcgtatctgtcgacgtagacacgtagcagttcactgctggcgcagaaatacacagatgtctgggagcgggtagctgactccagagtgagggggaaattctctgtcttggatctggagacaacatagccatcggggacttctcctttatctgtaatatcagcagctgctgagtaatagatcagcctcagcccatgtcccaggtcttgtcgataccagaacatatagctgtggctccaagtctggtgacacatcaaggtcacctgccttcctgtctctgtgatcttgtatcttgggctctgggtgattccagcatccctgtgtcctgtaatagaggtagacacgtagcagtctgagcgggctggcaaggc

SEQ ID NO: 491 - DNA, 495 bp, Artificial Sequence
  source: /note="Description of Artificial Sequence: Synthetic polynucleotide"
gcctccctcgcgccatcagcactgtacgtagcagtcgcacaaaaacccgagcgcagtctcgtccccggtcccccggcggccccagcttacccagcactgagagccgggtcccggcgccgaagtactgaatgttttgtcgaccactgtacgtagcagttcactgctggcgcagaaatacacagatgtctgggagcgggtagctgactccagagtgagggggaaattctctgtcttggatctggagacaacatagccatcggggacttctcctttatctgtaatatcagcagctgctgagtaatagatcagcctcagcccatgtcccaggtcttgtcgataccagaacatatagctgtggctccaagtctggtgacacatcaaggtcacctgccttcctgtctctgtgatcttgtatcttgggctctgggtgattccagcatccctgtgtcctgtaatagagcactgtacgtagcagtctgagcgggctggcaaggc

SEQ ID NO: 492 - DNA, 495 bp, Artificial Sequence
  source: /note="Description of Artificial Sequence: Synthetic polynucleotide"
gcctccctcgcgccatcaggatgatccgtagcagtccccgcaaaaaccagacccaagccgcccgcgcccgcgccccagcagcccgcgctcaccgagcaccaggagccgcgtgcctggcccgaagtactgggtctcgtcgacgatgatccgtagcagttcactgctggcgcagaaatacacagatgtctgggagcgggtagctgactccagagtgagggggaaattctctgtcttggatctggagacaacatagccatcggggacttctcctttatctgtaatatcagcagctgctgagtaatagatcagcctcagcccatgtcccaggtcttgtcgataccagaacatatagctgtggctccaagtctggtgacacatcaaggtcacctgccttcctgtctctgtgatcttgtatcttgggctctgggtgattccagcatccctgtgtcctgtaatagaggatgatccgtagcagtctgagcgggctggcaaggc

SEQ ID NO: 493 - DNA, 495 bp, Artificial Sequence
  source: /note="Description of Artificial Sequence: Synthetic polynucleotide"
gcctccctcgcgccatcagcgccaatagtagcagtccgccgccttccacctgaatcccgccgcccgggtggtcccgcgaaaactcacccagcacggtcagcctgctgccggccccgaaagtcaggacgttggcccgtcgaccgccaatagtagcagttcactgctggcgcagaaatacacagatgtctgggagcgggtagctgactccagagtgagggggaaattctctgtcttggatctggagacaacatagccatcggggacttctcctttatctgtaatatcagcagctgctgagtaatagatcagcctcagcccatgtcccaggtcttgtcgataccagaacatatagctgtggctccaagtctggtgacacatcaaggtcacctgccttcctgtctctgtgatcttgtatcttgggctctgggtgattccagcatccctgtgtcctgtaatagagcgccaatagtagcagtctgagcgggctggcaaggc

SEQ ID NO: 494 - DNA, 495 bp, Artificial Sequence
  source: /note="Description of Artificial Sequence: Synthetic polynucleotide"
gcctccctcgcgccatcagtcaagcctgtagcagtccaccctccgactccggggaccgaggggctggaaggtggggagacgcccgaatctcacctgtgaccgtgagcctggtgcccggcccgaagtactgctcgtgtcgactcaagcctgtagcagttcactgctggcgcagaaatacacagatgtctgggagcgggtagctgactccagagtgagggggaaattctctgtcttggatctggagacaacatagccatcggggacttctcctttatctgtaatatcagcagctgctgagtaatagatcagcctcagcccatgtcccaggtcttgtcgataccagaacatatagctgtggctccaagtctggtgacacatcaaggtcacctgccttcctgtctctgtgatcttgtatcttgggctctgggtgattccagcatccctgtgtcctgtaatagagtcaagcctgtagcagtctgagcgggctggcaaggc

SEQ ID NO: 495 - DNA, 495 bp, Artificial Sequence
  source: /note="Description of Artificial Sequence: Synthetic polynucleotide"
gcctccctcgcgccatcagagagtgtcatcttcgtctgtggacccacttttccctgtgacggatctgcaaaagaacctgaaaaatgtcttacctacaactgtgagtctggtgccttgtccaaagaaagcttcagtgtcgacagagtgtcatcttcgttcactgatggcacagaagtacacagatgtctgggagctggtagcggactccagagtgaggaggaaatcctctgtctttgatctagagacactatagccatctgagacttctcctttgtcagtatctttaacaccatatgagtaatggatcagcctcagcccatgccccgggtcttgtcgataccagtacatatagcggtggttctcagtctggtgacatctcagagtcactggtgttcctgtctctgtgaccttgtgtcttgggctctgggtgattccagcatccatgtgtcctgtaatagaaagagtgtcatcttcgtctgagcgggctggcaaggc

SEQ ID NO: 496 - DNA, 495 bp, Artificial Sequence
  source: /note="Description of Artificial Sequence: Synthetic polynucleotide"
gcctccctcgcgccatcaggttccgaaatcttcgtatttcccaggacagagtcctccctcatcgcacccctcctagagacccccagccttacctacaacggttaacctggtccccgaaccgaaggtgtagccatagtcgacgttccgaaatcttcgttcactgatggcacagaagtacacagatgtctgggagctggtagcggactccagagtgaggaggaaatcctctgtctttgatctagagacactatagccatctgagacttctcctttgtcagtatctttaacaccatatgagtaatggatcagcctcagcccatgccccgggtcttgtcgataccagtacatatagcggtggttctcagtctggtgacatctcagagtcactggtgttcctgtctctgtgaccttgtgtcttgggctctgggtgattccagcatccatgtgtcctgtaatagaagttccgaaatcttcgtctgagcgggctggcaaggc

SEQ ID NO: 497 - DNA, 495 bp, Artificial Sequence
  source: /note="Description of Artificial Sequence: Synthetic polynucleotide"
gcctccctcgcgccatcagcgttacttatcttcgtctggattccagcccctttttgcaagttcccagctgtccagccttgacttactcacctacaacagtgagccaacttccctctccaaaatatatggtgtttcgtcgaccgttacttatcttcgttcactgatggcacagaagtacacagatgtctgggagctggtagcggactccagagtgaggaggaaatcctctgtctttgatctagagacactatagccatctgagacttctcctttgtcagtatctttaacaccatatgagtaatggatcagcctcagcccatgccccgggtcttgtcgataccagtacatatagcggtggttctcagtctggtgacatctcagagtcactggtgttcctgtctctgtgaccttgtgtcttgggctctgggtgattccagcatccatgtgtcctgtaatagaacgttacttatcttcgtctgagcgggctggcaaggc

SEQ ID NO: 498 - DNA, 495 bp, Artificial Sequence
  source: /note="Description of Artificial Sequence: Synthetic polynucleotide"
gcctccctcgcgccatcagtaggagacatcttcgtctcctggaactccgaccttatgatacactatcccgaaagaagtcttttacatacccaagacagagagctgggttccactgccaaaaaacagtttttcattgtcgactaggagacatcttcgttcactgatggcacagaagtacacagatgtctgggagctggtagcggactccagagtgaggaggaaatcctctgtctttgatctagagacactatagccatctgagacttctcctttgtcagtatctttaacaccatatgagtaatggatcagcctcagcccatgccccgggtcttgtcgataccagtacatatagcggtggttctcagtctggtgacatctcagagtcactggtgttcctgtctctgtgaccttgtgtcttgggctctgggtgattccagcatccatgtgtcctgtaatagaataggagacatcttcgtctgagcgggctggcaaggc

SEQ ID NO: 499 - DNA, 495 bp, Artificial Sequence
  source: /note="Description of Artificial Sequence: Synthetic polynucleotide"
gcctccctcgcgccatcaggacactctatcttcgtagagaactctgccttcaagggacaatggccataccaccctgattctgcaacttacctaggatggagagtcgagtcccatcaccaaaatgctggggctgatgtcgacgacactctatcttcgttcactgatggcacagaagtacacagatgtctgggagctggtagcggactccagagtgaggaggaaatcctctgtctttgatctagagacactatagccatctgagacttctcctttgtcagtatctttaacaccatatgagtaatggatcagcctcagcccatgccccgggtcttgtcgataccagtacatatagcggtggttctcagtctggtgacatctcagagtcactggtgttcctgtctctgtgaccttgtgtcttgggctctgggtgattccagcatccatgtgtcctgtaatagaagacactctatcttcgtctgagcgggctggcaaggc

SEQ ID NO: 500 - DNA, 495 bp, Artificial Sequence
  source: /note="Description of Artificial Sequence: Synthetic polynucleotide"
gcctccctcgcgccatcagttcggaacatcttcgtatcattgcagtcaaacccaggcacccccgagtcaagagtggagcccccatacctgtcacagtgagcctggtcccgttcccaaagtggaggggtgaattatgtcgacttcggaacatcttcgttcactgatggcacagaagtacacagatgtctgggagctggtagcggactccagagtgaggaggaaatcctctgtctttgatctagagacactatagccatctgagacttctcctttgtcagtatctttaacaccatatgagtaatggatcagcctcagcccatgccccgggtcttgtcgataccagtacatatagcggtggttctcagtctggtgacatctcagagtcactggtgttcctgtctctgtgaccttgtgtcttgggctctgggtgattccagcatccatgtgtcctgtaatagaattcggaacatcttcgtctgagcgggctggcaaggc

SEQ ID NO: 501 - DNA, 495 bp, Artificial Sequence
  source: /note="Description of Artificial Sequence: Synthetic polynucleotide"
gcctccctcgcgccatcagaagtaacgatcttcgtgggtcgtgcaggctgggctgctcaccctctctcccacctggagcccccttcttacctagcacggtgagccgtgtccctggcccgaagaactgctcattgtgtcgacaagtaacgatcttcgttcactgatggcacagaagtacacagatgtctgggagctggtagcggactccagagtgaggaggaaatcctctgtctttgatctagagacactatagccatctgagacttctcctttgtcagtatctttaacaccatatgagtaatggatcagcctcagcccatgccccgggtcttgtcgataccagtacatatagcggtggttctcagtctggtgacatctcagagtcactggtgttcctgtctctgtgaccttgtgtcttgggctctgggtgattccagcatccatgtgtcctgtaatagaaaagtaacgatcttcgtctgagcgggctggcaaggc

SEQ ID NO: 502 - DNA, 495 bp, Artificial Sequence
  source: /note="Description of Artificial Sequence: Synthetic polynucleotide"
gcctccctcgcgccatcaggtctcctaatcttcgtcctctgcccatcccgccctctcggagctctccggagccccaaccgcctccttacccagtacggtcagcctagagccttctccaaaaaacagctccccggtgtcgacgtctcctaatcttcgttcactgatggcacagaagtacacagatgtctgggagctggtagcggactccagagtgaggaggaaatcctctgtctttgatctagagacactatagccatctgagacttctcctttgtcagtatctttaacaccatatgagtaatggatcagcctcagcccatgccccgggtcttgtcgataccagtacatatagcggtggttctcagtctggtgacatctcagagtcactggtgttcctgtctctgtgaccttgtgtcttgggctctgggtgattccagcatccatgtgtcctgtaatagaagtctcctaatcttcgtctgagcgggctggcaaggc

SEQ ID NO: 503 - DNA, 495 bp, Artificial Sequence
  source: /note="Description of Artificial Sequence: Synthetic polynucleotide"
gcctccctcgcgccatcaggtagacacatcttcgtgcgtcccggggcgccccctccccagttccggggcttcagcgggagcccccgcttaccgagcactgtcagccgggtgcctgggccaaaatactgcgtatctgtcgacgtagacacatcttcgttcactgatggcacagaagtacacagatgtctgggagctggtagcggactccagagtgaggaggaaatcctctgtctttgatctagagacactatagccatctgagacttctcctttgtcagtatctttaacaccatatgagtaatggatcagcctcagcccatgccccgggtcttgtcgataccagtacatatagcggtggttctcagtctggtgacatctcagagtcactggtgttcctgtctctgtgaccttgtgtcttgggctctgggtgattccagcatccatgtgtcctgtaatagaagtagacacatcttcgtctgagcgggctggcaaggc

SEQ ID NO: 504 - DNA, 495 bp, Artificial Sequence
  source: /note="Description of Artificial Sequence: Synthetic polynucleotide"
gcctccctcgcgccatcagcactgtacatcttcgtcgcacaaaaacccgagcgcagtctcgtccccggtcccccggcggccccagcttacccagcactgagagccgggtcccggcgccgaagtactgaatgttttgtcgaccactgtacatcttcgttcactgatggcacagaagtacacagatgtctgggagctggtagcggactccagagtgaggaggaaatcctctgtctttgatctagagacactatagccatctgagacttctcctttgtcagtatctttaacaccatatgagtaatggatcagcctcagcccatgccccgggtcttgtcgataccagtacatatagcggtggttctcagtctggtgacatctcagagtcactggtgttcctgtctctgtgaccttgtgtcttgggctctgggtgattccagcatccatgtgtcctgtaatagaacactgtacatcttcgtctgagcgggctggcaaggc

SEQ ID NO: 505 - DNA, 495 bp, Artificial Sequence
  source: /note="Description of Artificial Sequence: Synthetic polynucleotide"
gcctccctcgcgccatcaggatgatccatcttcgtccccgcaaaaaccagacccaagccgcccgcgcccgcgccccagcagcccgcgctcaccgagcaccaggagccgcgtgcctggcccgaagtactgggtctcgtcgacgatgatccatcttcgttcactgatggcacagaagtacacagatgtctgggagctggtagcggactccagagtgaggaggaaatcctctgtctttgatctagagacactatagccatctgagacttctcctttgtcagtatctttaacaccatatgagtaatggatcagcctcagcccatgccccgggtcttgtcgataccagtacatatagcggtggttctcagtctggtgacatctcagagtcactggtgttcctgtctctgtgaccttgtgtcttgggctctgggtgattccagcatccatgtgtcctgtaatagaagatgatccatcttcgtctgagcgggctggcaaggc

SEQ ID NO: 506 - DNA, 495 bp, Artificial Sequence
  source: /note="Description of Artificial Sequence: Synthetic polynucleotide"
gcctccctcgcgccatcagcgccaataatcttcgtccgccgccttccacctgaatcccgccgcccgggtggtcccgcgaaaactcacccagcacggtcagcctgctgccggccccgaaagtcaggacgttggcccgtcgaccgccaataatcttcgttcactgatggcacagaagtacacagatgtctgggagctggtagcggactccagagtgaggaggaaatcctctgtctttgatctagagacactatagccatctgagacttctcctttgtcagtatctttaacaccatatgagtaatggatcagcctcagcccatgccccgggtcttgtcgataccagtacatatagcggtggttctcagtctggtgacatctcagagtcactggtgttcctgtctctgtgaccttgtgtcttgggctctgggtgattccagcatccatgtgtcctgtaatagaacgccaataatcttcgtctgagcgggctggcaaggc

SEQ ID NO: 507 - DNA, 495 bp, Artificial Sequence
  source: /note="Description of Artificial Sequence: Synthetic polynucleotide"
gcctccctcgcgccatcagtcaagcctatcttcgtccaccctccgactccggggaccgaggggctggaaggtggggagacgcccgaatctcacctgtgaccgtgagcctggtgcccggcccgaagtactgctcgtgtcgactcaagcctatcttcgttcactgatggcacagaagtacacagatgtctgggagctggtagcggactccagagtgaggaggaaatcctctgtctttgatctagagacactatagccatctgagacttctcctttgtcagtatctttaacaccatatgagtaatggatcagcctcagcccatgccccgggtcttgtcgataccagtacatatagcggtggttctcagtctggtgacatctcagagtcactggtgttcctgtctctgtgaccttgtgtcttgggctctgggtgattccagcatccatgtgtcctgtaatagaatcaagcctatcttcgtctgagcgggctggcaaggc

SEQ ID NO: 508 - DNA, 495 bp, Artificial Sequence
  source: /note="Description of Artificial Sequence: Synthetic polynucleotide"
gcctccctcgcgccatcagagagtgtctccacagtctgtggacccacttttccctgtgacggatctgcaaaagaacctgaaaaatgtcttacctacaactgtgagtctggtgccttgtccaaagaaagcttcagtgtcgacagagtgtctccacagttcactgctggcacagagatacatggccgagtccccaagctctgcaggctggatcttgagagtggagtctactcctttgagcctctctgcagaaaatcgatccttaggcaactgtgaatcatctactacactctcatcctgaaattgaaccagaagctccgggccctgtcccaggatctgccggtaccagtaaagggtagcatggccagaaataggatcacaccaaaaagccacagcctggcttttctctgtaatcttatatctgggggactgggcaacttcagcttctgagagttctgttgggagagtgtctccacagtctgagcgggctggcaaggc

SEQ ID NO: 509 - DNA, 495 bp, Artificial Sequence
  source: /note="Description of Artificial Sequence: Synthetic polynucleotide"
gcctccctcgcgccatcaggttccgaatccacagtatttcccaggacagagtcctccctcatcgcacccctcctagagacccccagccttacctacaacggttaacctggtccccgaaccgaaggtgtagccatagtcgacgttccgaatccacagttcactgctggcacagagatacatggccgagtccccaagctctgcaggctggatcttgagagtggagtctactcctttgagcctctctgcagaaaatcgatccttaggcaactgtgaatcatctactacactctcatcctgaaattgaaccagaagctccgggccctgtcccaggatctgccggtaccagtaaagggtagcatggccagaaataggatcacaccaaaaagccacagcctggcttttctctgtaatcttatatctgggggactgggcaacttcagcttctgagagttctgttggggttccgaatccacagtctgagcgggctggcaaggc

SEQ ID NO: 510 - DNA, 495 bp, Artificial Sequence
  source: /note="Description of Artificial Sequence: Synthetic polynucleotide"
gcctccctcgcgccatcagcgttactttccacagtctggattccagcccctttttgcaagttcccagctgtccagccttgacttactcacctacaacagtgagccaacttccctctccaaaatatatggtgtttcgtcgaccgttactttccacagttcactgctggcacagagatacatggccgagtccccaagctctgcaggctggatcttgagagtggagtctactcctttgagcctctctgcagaaaatcgatccttaggcaactgtgaatcatctactacactctcatcctgaaattgaaccagaagctccgggccctgtcccaggatctgccggtaccagtaaagggtagcatggccagaaataggatcacaccaaaaagccacagcctggcttttctctgtaatcttatatctgggggactgggcaacttcagcttctgagagttctgttgggcgttactttccacagtctgagcgggctggcaaggc

SEQ ID NO: 511 - DNA, 495 bp, Artificial Sequence
  source: /note="Description of Artificial Sequence: Synthetic polynucleotide"
gcctccctcgcgccatcagtaggagactccacagtctcctggaactccgaccttatgatacactatcccgaaagaagtcttttacatacccaagacagagagctgggttccactgccaaaaaacagtttttcattgtcgactaggagactccacagttcactgctggcacagagatacatggccgagtccccaagctctgcaggctggatcttgagagtggagtctactcctttgagcctctctgcagaaaatcgatccttaggcaactgtgaatcatctactacactctcatcctgaaattgaaccagaagctccgggccctgtcccaggatctgccggtaccagtaaagggtagcatggccagaaataggatcacaccaaaaagccacagcctggcttttctctgtaatcttatatctgggggactgggcaacttcagcttctgagagttctgttgggtaggagactccacagtctgagcgggctggcaaggc

SEQ ID NO: 512 - DNA, 495 bp, Artificial Sequence
  source: /note="Description of Artificial Sequence: Synthetic polynucleotide"
gcctccctcgcgccatcaggacactcttccacagtagagaactctgccttcaagggacaatggccataccaccctgattctgcaacttacctaggatggagagtcgagtcccatcaccaaaatgctggggctgatgtcgacgacactcttccacagttcactgctggcacagagatacatggccgagtccccaagctctgcaggctggatcttgagagtggagtctactcctttgagcctctctgcagaaaatcgatccttaggcaactgtgaatcatctactacactctcatcctgaaattgaaccagaagctccgggccctgtcccaggatctgccggtaccagtaaagggtagcatggccagaaataggatcacaccaaaaagccacagcctggcttttctctgtaatcttatatctgggggactgggcaacttcagcttctgagagttctgttggggacactcttccacagtctgagcgggctggcaaggc

SEQ ID NO: 513 - DNA, 495 bp, Artificial Sequence
  source: /note="Description of Artificial Sequence: Synthetic polynucleotide"
gcctccctcgcgccatcagttcggaactccacagtatcattgcagtcaaacccaggcacccccgagtcaagagtggagcccccatacctgtcacagtgagcctggtcccgttcccaaagtggaggggtgaattatgtcgacttcggaactccacagttcactgctggcacagagatacatggccgagtccccaagctctgcaggctggatcttgagagtggagtctactcctttgagcctctctgcagaaaatcgatccttaggcaactgtgaatcatctactacactctcatcctgaaattgaaccagaagctccgggccctgtcccaggatctgccggtaccagtaaagggtagcatggccagaaataggatcacaccaaaaagccacagcctggcttttctctgtaatcttatatctgggggactgggcaacttcagcttctgagagttctgttgggttcggaactccacagtctgagcgggctggcaaggc

SEQ ID NO: 514 - DNA, 495 bp, Artificial Sequence
  source: /note="Description of Artificial Sequence: Synthetic polynucleotide"
gcctccctcgcgccatcagaagtaacgtccacagtgggtcgtgcaggctgggctgctcaccctctctcccacctggagcccccttcttacctagcacggtgagccgtgtccctggcccgaagaactgctcattgtgtcgacaagtaacgtccacagttcactgctggcacagagatacatggccgagtccccaagctctgcaggctggatcttgagagtggagtctactcctttgagcctctctgcagaaaatcgatccttaggcaactgtgaatcatctactacactctcatcctgaaattgaaccagaagctccgggccctgtcccaggatctgccggtaccagtaaagggtagcatggccagaaataggatcacaccaaaaagccacagcctggcttttctctgtaatcttatatctgggggactgggcaacttcagcttctgagagttctgttgggaagtaacgtccacagtctgagcgggctggcaaggc

SEQ ID NO: 515 - DNA, 495 bp, Artificial Sequence
  source: /note="Description of Artificial Sequence: Synthetic polynucleotide"
gcctccctcgcgccatcaggtctcctatccacagtcctctgcccatcccgccctctcggagctctccggagccccaaccgcctccttacccagtacggtcagcctagagccttctccaaaaaacagctccccggtgtcgacgtctcctatccacagttcactgctggcacagagatacatggccgagtccccaagctctgcaggctggatcttgagagtggagtctactcctttgagcctctctgcagaaaatcgatccttaggcaactgtgaatcatctactacactctcatcctgaaattgaaccagaagctccgggccctgtcccaggatctgccggtaccagtaaagggtagcatggccagaaataggatcacaccaaaaagccacagcctggcttttctctgtaatcttatatctgggggactgggcaacttcagcttctgagagttctgttggggtctcctatccacagtctgagcgggctggcaaggc

SEQ ID NO: 516 - DNA, 495 bp, Artificial Sequence
  source: /note="Description of Artificial Sequence: Synthetic polynucleotide"
gcctccctcgcgccatcaggtagacactccacagtgcgtcccggggcgccccctccccagttccggggcttcagcgggagcccccgcttaccgagcactgtcagccgggtgcctgggccaaaatactgcgtatctgtcgacgtagacactccacagttcactgctggcacagagatacatggccgagtccccaagctctgcaggctggatcttgagagtggagtctactcctttgagcctctctgcagaaaatcgatccttaggcaactgtgaatcatctactacactctcatcctgaaattgaaccagaagctccgggccctgtcccaggatctgccggtaccagtaaagggtagcatggccagaaataggatcacaccaaaaagccacagcctggcttttctctgtaatcttatatctgggggactgggcaacttcagcttctgagagttctgttggggtagacactccacagtctgagcgggctggcaaggc

SEQ ID NO: 517 - DNA, 495 bp, Artificial Sequence
  source: /note="Description of Artificial Sequence: Synthetic polynucleotide"
gcctccctcgcgccatcagcactgtactccacagtcgcacaaaaacccgagcgcagtctcgtccccggtcccccggcggccccagcttacccagcactgagagccgggtcccggcgccgaagtactgaatgttttgtcgaccactgtactccacagttcactgctggcacagagatacatggccgagtccccaagctctgcaggctggatcttgagagtggagtctactcctttgagcctctctgcagaaaatcgatccttaggcaactgtgaatcatctactacactctcatcctgaaattgaaccagaagctccgggccctgtcccaggatctgccggtaccagtaaagggtagcatggccagaaataggatcacaccaaaaagccacagcctggcttttctctgtaatcttatatctgggggactgggcaacttcagcttctgagagttctgttgggcactgtactccacagtctgagcgggctggcaaggc

SEQ ID NO: 518 - DNA, 495 bp, Artificial Sequence
  source: /note="Description of Artificial Sequence: Synthetic polynucleotide"
gcctccctcgcgccatcaggatgatcctccacagtccccgcaaaaaccagacccaagccgcccgcgcccgcgccccagcagcccgcgctcaccgagcaccaggagccgcgtgcctggcccgaagtactgggtctcgtcgacgatgatcctccacagttcactgctggcacagagatacatggccgagtccccaagctctgcaggctggatcttgagagtggagtctactcctttgagcctctctgcagaaaatcgatccttaggcaactgtgaatcatctactacactctcatcctgaaattgaaccagaagctccgggccctgtcccaggatctgccggtaccagtaaagggtagcatggccagaaataggatcacaccaaaaagccacagcctggcttttctctgtaatcttatatctgggggactgggcaacttcagcttctgagagttctgttggggatgatcctccacagtctgagcgggctggcaaggc

SEQ ID NO: 519 - DNA, 495 bp, Artificial Sequence
  source: /note="Description of Artificial Sequence: Synthetic polynucleotide"
gcctccctcgcgccatcagcgccaatatccacagtccgccgccttccacctgaatcccgccgcccgggtggtcccgcgaaaactcacccagcacggtcagcctgctgccggccccgaaagtcaggacgttggcccgtcgaccgccaatatccacagttcactgctggcacagagatacatggccgagtccccaagctctgcaggctggatcttgagagtggagtctactcctttgagcctctctgcagaaaatcgatccttaggcaactgtgaatcatctactacactctcatcctgaaattgaaccagaagctccgggccctgtcccaggatctgccggtaccagtaaagggtagcatggccagaaataggatcacaccaaaaagccacagcctggcttttctctgtaatcttatatctgggggactgggcaacttcagcttctgagagttctgttgggcgccaatatccacagtctgagcgggctggcaaggc

SEQ ID NO: 520 - DNA, 495 bp, Artificial Sequence
  source: /note="Description of Artificial Sequence: Synthetic polynucleotide"
gcctccctcgcgccatcagtcaagccttccacagtccaccctccgactccggggaccgaggggctggaaggtggggagacgcccgaatctcacctgtgaccgtgagcctggtgcccggcccgaagtactgctcgtgtcgactcaagccttccacagttcactgctggcacagagatacatggccgagtccccaagctctgcaggctggatcttgagagtggagtctactcctttgagcctctctgcagaaaatcgatccttaggcaactgtgaatcatctactacactctcatcctgaaattgaaccagaagctccgggccctgtcccaggatctgccggtaccagtaaagggtagcatggccagaaataggatcacaccaaaaagccacagcctggcttttctctgtaatcttatatctgggggactgggcaacttcagcttctgagagttctgttgggtcaagccttccacagtctgagcgggctggcaaggc

SEQ ID NO: 521 - DNA, 495 bp, Artificial Sequence
  source: /note="Description of Artificial Sequence: Synthetic polynucleotide"
gcctccctcgcgccatcagagagtgtcatgacaccctgtggacccacttttccctgtgacggatctgcaaaagaacctgaaaaatgtcttacctacaactgtgagtctggtgccttgtccaaagaaagcttcagtgtcgacagagtgtcatgacacctcactgctggcacagagatacacggccgagtcctcaagctttgcaggctggatcttgagagtggagtctactcctttgagcctctctgcagaaaatcgatccttaggcaactgtgaatcatccactacaccgttattctgaaactgaatcagaagctttgggccctgtcccaggatctgctggtaccagtaaagggtagcatggccagatataggattgcaccaaaaagccacactctgccttttctctataatcttatatctgggagactgggcaactccagcttctgtgagttctgagaagagagtgtcatgacaccctgagcgggctggcaaggc

SEQ ID NO: 522 - DNA, 495 bp, Artificial Sequence
  source: /note="Description of Artificial Sequence: Synthetic polynucleotide"
gcctccctcgcgccatcaggttccgaaatgacaccatttcccaggacagagtcctccctcatcgcacccctcctagagacccccagccttacctacaacggttaacctggtccccgaaccgaaggtgtagccatagtcgacgttccgaaatgacacctcactgctggcacagagatacacggccgagtcctcaagctttgcaggctggatcttgagagtggagtctactcctttgagcctctctgcagaaaatcgatccttaggcaactgtgaatcatccactacaccgttattctgaaactgaatcagaagctttgggccctgtcccaggatctgctggtaccagtaaagggtagcatggccagatataggattgcaccaaaaagccacactctgccttttctctataatcttatatctgggagactgggcaactccagcttctgtgagttctgagaaggttccgaaatgacaccctgagcgggctggcaaggc

SEQ ID NO: 523 - DNA, 495 bp, Artificial Sequence
  source: /note="Description of Artificial Sequence: Synthetic polynucleotide"
gcctccctcgcgccatcagcgttacttatgacaccctggattccagcccctttttgcaagttcccagctgtccagccttgacttactcacctacaacagtgagccaacttccctctccaaaatatatggtgtttcgtcgaccgttacttatgacacctcactgctggcacagagatacacggccgagtcctcaagctttgcaggctggatcttgagagtggagtctactcctttgagcctctctgcagaaaatcgatccttaggcaactgtgaatcatccactacaccgttattctgaaactgaatcagaagctttgggccctgtcccaggatctgctggtaccagtaaagggtagcatggccagatataggattgcaccaaaaagccacactctgccttttctctataatcttatatctgggagactgggcaactccagcttctgtgagttctgagaagcgttacttatgacaccctgagcgggctggcaaggc

SEQ ID NO: 524 - DNA, 495 bp, Artificial Sequence
  source: /note="Description of Artificial Sequence: Synthetic polynucleotide"
gcctccctcgcgccatcagtaggagacatgacaccctcctggaactccgaccttatgatacactatcccgaaagaagtcttttacatacccaagacagagagctgggttccactgccaaaaaacagtttttcattgtcgactaggagacatgacacctcactgctggcacagagatacacggccgagtcctcaagctttgcaggctggatcttgagagtggagtctactcctttgagcctctctgcagaaaatcgatccttaggcaactgtgaatcatccactacaccgttattctgaaactgaatcagaagctttgggccctgtcccaggatctgctggtaccagtaaagggtagcatggccagatataggattgcaccaaaaagccacactctgccttttctctataatcttatatctgggagactgggcaactccagcttctgtgagttctgagaagtaggagacatgacaccctgagcgggctggcaaggc

SEQ ID NO: 525 - DNA, 495 bp, Artificial Sequence
  source: /note="Description of Artificial Sequence: Synthetic polynucleotide"
gcctccctcgcgccatcaggacactctatgacaccagagaactctgccttcaagggacaatggccataccaccctgattctgcaacttacctaggatggagagtcgagtcccatcaccaaaatgctggggctgatgtcgacgacactctatgacacctcactgctggcacagagatacacggccgagtcctcaagctttgcaggctggatcttgagagtggagtctactcctttgagcctctctgcagaaaatcgatccttaggcaactgtgaatcatccactacaccgttattctgaaactgaatcagaagctttgggccctgtcccaggatctgctggtaccagtaaagggtagcatggccagatataggattgcaccaaaaagccacactctgccttttctctataatcttatatctgggagactgggcaactccagcttctgtgagttctgagaaggacactctatgacaccctgagcgggctggcaaggc

SEQ ID NO: 526 - DNA, 495 bp, Artificial Sequence
  source: /note="Description of Artificial Sequence: Synthetic polynucleotide"
gcctccctcgcgccatcagttcggaacatgacaccatcattgcagtcaaacccaggcacccccgagtcaagagtggagcccccatacctgtcacagtgagcctggtcccgttcccaaagtggaggggtgaattatgtcgacttcggaacatgacacctcactgctggcacagagatacacggccgagtcctcaagctttgcaggctggatcttgagagtggagtctactcctttgagcctctctgcagaaaatcgatccttaggcaactgtgaatcatccactacaccgttattctgaaactgaatcagaagctttgggccctgtcccaggatctgctggtaccagtaaagggtagcatggccagatataggattgcaccaaaaagccacactctgccttttctctataatcttatatctgggagactgggcaactccagcttctgtgagttctgagaagttcggaacatgacaccctgagcgggctggcaaggc

SEQ ID NO: 527 - DNA, 495 bp, Artificial Sequence
  source: /note="Description of Artificial Sequence: Synthetic polynucleotide"
gcctccctcgcgccatcagaagtaacgatgacaccgggtcgtgcaggctgggctgctcaccctctctcccacctggagcccccttcttacctagcacggtgagccgtgtccctggcccgaagaactgctcattgtgtcgacaagtaacgatgacacctcactgctggcacagagatacacggccgagtcctcaagctttgcaggctggatcttgagagtggagtctactcctttgagcctctctgcagaaaatcgatccttaggcaactgtgaatcatccactacaccgttattctgaaactgaatcagaagctttgggccctgtcccaggatctgctggtaccagtaaagggtagcatggccagatataggattgcaccaaaaagccacactctgccttttctctataatcttatatctgggagactgggcaactccagcttctgtgagttctgagaagaagtaacgatgacaccctgagcgggctggcaaggc

SEQ ID NO: 528 - DNA, 495 bp, Artificial Sequence
  source: /note="Description of Artificial Sequence: Synthetic polynucleotide"
gcctccctcgcgccatcaggtctcctaatgacacccctctgcccatcccgccctctcggagctctccggagccccaaccgcctccttacccagtacggtcagcctagagccttctccaaaaaacagctccccggtgtcgacgtctcctaatgacacctcactgctggcacagagatacacggccgagtcctcaagctttgcaggctggatcttgagagtggagtctactcctttgagcctctctgcagaaaatcgatccttaggcaactgtgaatcatccactacaccgttattctgaaactgaatcagaagctttgggccctgtcccaggatctgctggtaccagtaaagggtagcatggccagatataggattgcaccaaaaagccacactctgccttttctctataatcttatatctgggagactgggcaactccagcttctgtgagttctgagaaggtctcctaatgacaccctgagcgggctggcaaggc

SEQ ID NO: 529 - DNA, 495 bp, Artificial Sequence
  source: /note="Description of Artificial Sequence: Synthetic polynucleotide"
gcctccctcgcgccatcaggtagacacatgacaccgcgtcccggggcgccccctccccagttccggggcttcagcgggagcccccgcttaccgagcactgtcagccgggtgcctgggccaaaatactgcgtatctgtcgacgtagacacatgacacctcactgctggcacagagatacacggccgagtcctcaagctttgcaggctggatcttgagagtggagtctactcctttgagcctctctgcagaaaatcgatccttaggcaactgtgaatcatccactacaccgttattctgaaactgaatcagaagctttgggccctgtcccaggatctgctggtaccagtaaagggtagcatggccagatataggattgcaccaaaaagccacactctgccttttctctataatcttatatctgggagactgggcaactccagcttctgtgagttctgagaaggtagacacatgacaccctgagcgggctggcaaggc

SEQ ID NO: 530 - DNA, 495 bp, Artificial Sequence
  source: /note="Description of Artificial Sequence: Synthetic polynucleotide"
gcctccctcgcgccatcagcactgtacatgacacccgcacaaaaacccgagcgcagtctcgtccccggtcccccggcggccccagcttacccagcactgagagccgggtcccggcgccgaagtactgaatgttttgtcgaccactgtacatgacacctcactgctggcacagagatacacggccgagtcctcaagctttgcaggctggatcttgagagtggagtctactcctttgagcctctctgcagaaaatcgatccttaggcaactgtgaatcatccactacaccgttattctgaaactgaatcagaagctttgggccctgtcccaggatctgctggtaccagtaaagggtagcatggccagatataggattgcaccaaaaagccacactctgccttttctctataatcttatatctgggagactgggcaactccagcttctgtgagttctgagaagcactgtacatgacaccctgagcgggctggcaaggc

SEQ ID NO: 531 - DNA, 495 bp, Artificial Sequence
  source: /note="Description of Artificial Sequence: Synthetic polynucleotide"
gcctccctcgcgccatcaggatgatccatgacaccccccgcaaaaaccagacccaagccgcccgcgcccgcgccccagcagcccgcgctcaccgagcaccaggagccgcgtgcctggcccgaagtactgggtctcgtcgacgatgatccatgacacctcactgctggcacagagatacacggccgagtcctcaagctttgcaggctggatcttgagagtggagtctactcctttgagcctctctgcagaaaatcgatccttaggcaactgtgaatcatccactacaccgttattctgaaactgaatcagaagctttgggccctgtcccaggatctgctggtaccagtaaagggtagcatggccagatataggattgcaccaaaaagccacactctgccttttctctataatcttatatctgggagactgggcaactccagcttctgtgagttctgagaaggatgatccatgacaccctgagcgggctggcaaggc

SEQ ID NO: 532 - DNA, 495 bp, Artificial Sequence
  source: /note="Description of Artificial Sequence: Synthetic polynucleotide"
gcctccctcgcgccatcagcgccaataatgacaccccgccgccttccacctgaatcccgccgcccgggtggtcccgcgaaaactcacccagcacggtcagcctgctgccggccccgaaagtcaggacgttggcccgtcgaccgccaataatgacacctcactgctggcacagagatacacggccgagtcctcaagctttgcaggctggatcttgagagtggagtctactcctttgagcctctctgcagaaaatcgatccttaggcaactgtgaatcatccactacaccgttattctgaaactgaatcagaagctttgggccctgtcccaggatctgctggtaccagtaaagggtagcatggccagatataggattgcaccaaaaagccacactctgccttttctctataatcttatatctgggagactgggcaactccagcttctgtgagttctgagaagcgccaataatgacaccctgagcgggctggcaaggc

SEQ ID NO: 533 - DNA, 495 bp, Artificial Sequence
  source: /note="Description of Artificial Sequence: Synthetic polynucleotide"
gcctccctcgcgccatcagtcaagcctatgacaccccaccctccgactccggggaccgaggggctggaaggtggggagacgcccgaatctcacctgtgaccgtgagcctggtgcccggcccgaagtactgctcgtgtcgactcaagcctatgacacctcactgctggcacagagatacacggccgagtcctcaagctttgcaggctggatcttgagagtggagtctactcctttgagcctctctgcagaaaatcgatccttaggcaactgtgaatcatccactacaccgttattctgaaactgaatcagaagctttgggccctgtcccaggatctgctggtaccagtaaagggtagcatggccagatataggattgcaccaaaaagccacactctgccttttctctataatcttatatctgggagactgggcaactccagcttctgtgagttctgagaagtcaagcctatgacaccctgagcgggctggcaaggc

SEQ ID NO: 534 - DNA, 495 bp, Artificial Sequence
  source: /note="Description of Artificial Sequence: Synthetic polynucleotide"
gcctccctcgcgccatcagagagtgtccttcacgactgtggacccacttttccctgtgacggatctgcaaaagaacctgaaaaatgtcttacctacaactgtgagtctggtgccttgtccaaagaaagcttcagtgtcgacagagtgtccttcacgatcactgctggcacagagatacacggccgagtccccaagctctgcaggctggatcttgagagtggagtctactcctttgagcctctctgcagaaaatcgatccttaggcaactgtgaatcgtctactgcttcctcattctcatatcgaatcagaagctccgggccctgtcccaagttctgcaggtaccagtaaagggtattgtggccagaaataggattgcaccaaaaagccacaggctgttttttctctataatcttatatctgggagactgaaccactccagcttctatgagttctgtggggagagtgtccttcacgactgagcgggctggcaaggc

SEQ ID NO: 535 - DNA, 495 bp, Artificial Sequence
  source: /note="Description of Artificial Sequence: Synthetic polynucleotide"
gcctccctcgcgccatcaggttccgaacttcacgaatttcccaggacagagtcctccctcatcgcacccctcctagagacccccagccttacctacaacggttaacctggtccccgaaccgaaggtgtagccatagtcgacgttccgaacttcacgatcactgctggcacagagatacacggccgagtccccaagctctgcaggctggatcttgagagtggagtctactcctttgagcctctctgcagaaaatcgatccttaggcaactgtgaatcgtctactgcttcctcattctcatatcgaatcagaagctccgggccctgtcccaagttctgcaggtaccagtaaagggtattgtggccagaaataggattgcaccaaaaagccacaggctgttttttctctataatcttatatctgggagactgaaccactccagcttctatgagttctgtgggggttccgaacttcacgactgagcgggctggcaaggc

SEQ ID NO: 536 - DNA, 495 bp, Artificial Sequence
  source: /note="Description of Artificial Sequence: Synthetic polynucleotide"
gcctccctcgcgccatcagcgttacttcttcacgactggattccagcccctttttgcaagttcccagctgtccagccttgacttactcacctacaacagtgagccaacttccctctccaaaatatatggtgtttcgtcgaccgttacttcttcacgatcactgctggcacagagatacacggccgagtccccaagctctgcaggctggatcttgagagtggagtctactcctttgagcctctctgcagaaaatcgatccttaggcaactgtgaatcgtctactgcttcctcattctcatatcgaatcagaagctccgggccctgtcccaagttctgcaggtaccagtaaagggtattgtggccagaaataggattgcaccaaaaagccacaggctgttttttctctataatcttatatctgggagactgaaccactccagcttctatgagttctgtggggcgttacttcttcacgactgagcgggctggcaaggc

SEQ ID NO: 537 - DNA, 495 bp, Artificial Sequence
  source: /note="Description of Artificial Sequence: Synthetic polynucleotide"
gcctccctcgcgccatcagtaggagaccttcacgactcctggaactccgaccttatgatacactatcccgaaagaagtcttttacatacccaagacagagagctgggttccactgccaaaaaacagtttttcattgtcgactaggagaccttcacgatcactgctggcacagagatacacggccgagtccccaagctctgcaggctggatcttgagagtggagtctactcctttgagcctctctgcagaaaatcgatccttaggcaactgtgaatcgtctactgcttcctcattctcatatcgaatcagaagctccgggccctgtcccaagttctgcaggtaccagtaaagggtattgtggccagaaataggattgcaccaaaaagccacaggctgttttttctctataatcttatatctgggagactgaaccactccagcttctatgagttctgtggggtaggagaccttcacgactgagcgggctggcaaggc

SEQ ID NO: 538 - DNA, 495 bp, Artificial Sequence
  source: /note="Description of Artificial Sequence: Synthetic polynucleotide"
gcctccctcgcgccatcaggacactctcttcacgaagagaactctgccttcaagggacaatggccataccaccctgattctgcaacttacctaggatggagagtcgagtcccatcaccaaaatgctggggctgatgtcgacgacactctcttcacgatcactgctggcacagagatacacggccgagtccccaagctctgcaggctggatcttgagagtggagtctactcctttgagcctctctgcagaaaatcgatccttaggcaactgtgaatcgtctactgcttcctcattctcatatcgaatcagaagctccgggccctgtcccaagttctgcaggtaccagtaaagggtattgtggccagaaataggattgcaccaaaaagccacaggctgttttttctctataatcttatatctgggagactgaaccactccagcttctatgagttctgtgggggacactctcttcacgactgagcgggctggcaaggc

SEQ ID NO: 539 - DNA, 495 bp, Artificial Sequence
  source: /note="Description of Artificial Sequence: Synthetic polynucleotide"
gcctccctcgcgccatcagttcggaaccttcacgaatcattgcagtcaaacccaggcacccccgagtcaagagtggagcccccatacctgtcacagtgagcctggtcccgttcccaaagtggaggggtgaattatgtcgacttcggaaccttcacgatcactgctggcacagagatacacggccgagtccccaagctctgcaggctggatcttgagagtggagtctactcctttgagcctctctgcagaaaatcgatccttaggcaactgtgaatcgtctactgcttcctcattctcatatcgaatcagaagctccgggccctgtcccaagttctgcaggtaccagtaaagggtattgtggccagaaataggattgcaccaaaaagccacaggctgttttttctctataatcttatatctgggagactgaaccactccagcttctatgagttctgtggggttcggaaccttcacgactgagcgggctggcaaggc

SEQ ID NO: 540 - DNA, 495 bp, Artificial Sequence
  source: /note="Description of Artificial Sequence: Synthetic polynucleotide"
gcctccctcgcgccatcagaagtaacgcttcacgagggtcgtgcaggctgggctgctcaccctctctcccacctggagcccccttcttacctagcacggtgagccgtgtccctggcccgaagaactgctcattgtgtcgacaagtaacgcttcacgatcactgctggcacagagatacacggccgagtccccaagctctgcaggctggatcttgagagtggagtctactcctttgagcctctctgcagaaaatcgatccttaggcaactgtgaatcgtctactgcttcctcattctcatatcgaatcagaagctccgggccctgtcccaagttctgcaggtaccagtaaagggtattgtggccagaaataggattgcaccaaaaagccacaggctgttttttctctataatcttatatctgggagactgaaccactccagcttctatgagttctgtggggaagtaacgcttcacgactgagcgggctggcaaggc

SEQ ID NO: 541 - DNA, 495 bp, Artificial Sequence
  source: /note="Description of Artificial Sequence: Synthetic polynucleotide"
gcctccctcgcgccatcaggtctcctacttcacgacctctgcccatcccgccctctcggagctctccggagccccaaccgcctccttacccagtacggtcagcctagagccttctccaaaaaacagctccccggtgtcgacgtctcctacttcacgatcactgctggcacagagatacacggccgagtccccaagctctgcaggctggatcttgagagtggagtctactcctttgagcctctctgcagaaaatcgatccttaggcaactgtgaatcgtctactgcttcctcattctcatatcgaatcagaagctccgggccctgtcccaagttctgcaggtaccagtaaagggtattgtggccagaaataggattgcaccaaaaagccacaggctgttttttctctataatcttatatctgggagactgaaccactccagcttctatgagttctgtgggggtctcctacttcacgactgagcgggctggcaaggc

SEQ ID NO: 542 - DNA, 495 bp, Artificial Sequence
  source: /note="Description of Artificial Sequence: Synthetic polynucleotide"
gcctccctcgcgccatcaggtagacaccttcacgagcgtcccggggcgccccctccccagttccggggcttcagcgggagcccccgcttaccgagcactgtcagccgggtgcctgggccaaaatactgcgtatctgtcgacgtagacaccttcacgatcactgctggcacagagatacacggccgagtccccaagctctgcaggctggatcttgagagtggagtctactcctttgagcctctctgcagaaaatcgatccttaggcaactgtgaatcgtctactgcttcctcattctcatatcgaatcagaagctccgggccctgtcccaagttctgcaggtaccagtaaagggtattgtggccagaaataggattgcaccaaaaagccacaggctgttttttctctataatcttatatctgggagactgaaccactccagcttctatgagttctgtgggggtagacaccttcacgactgagcgggctggcaaggc

SEQ ID NO: 543 - DNA, 495 bp, Artificial Sequence
  source: /note="Description of Artificial Sequence: Synthetic polynucleotide"
gcctccctcgcgccatcagcactgtaccttcacgacgcacaaaaacccgagcgcagtctcgtccccggtcccccggcggccccagcttacccagcactgagagccgggtcccggcgccgaagtactgaatgttttgtcgaccactgtaccttcacgatcactgctggcacagagatacacggccgagtccccaagctctgcaggctggatcttgagagtggagtctactcctttgagcctctctgcagaaaatcgatccttaggcaactgtgaatcgtctactgcttcctcattctcatatcgaatcagaagctccgggccctgtcccaagttctgcaggtaccagtaaagggtattgtggccagaaataggattgcaccaaaaagccacaggctgttttttctctataatcttatatctgggagactgaaccactccagcttctatgagttctgtggggcactgtaccttcacgactgagcgggctggcaaggc

SEQ ID NO: 544 - DNA, 495 bp, Artificial Sequence
  source: /note="Description of Artificial Sequence: Synthetic polynucleotide"
gcctccctcgcgccatcaggatgatcccttcacgaccccgcaaaaaccagacccaagccgcccgcgcccgcgccccagcagcccgcgctcaccgagcaccaggagccgcgtgcctggcccgaagtactgggtctcgtcgacgatgatcccttcacgatcactgctggcacagagatacacggccgagtccccaagctctgcaggctggatcttgagagtggagtctactcctttgagcctctctgcagaaaatcgatccttaggcaactgtgaatcgtctactgcttcctcattctcatatcgaatcagaagctccgggccctgtcccaagttctgcaggtaccagtaaagggtattgtggccagaaataggattgcaccaaaaagccacaggctgttttttctctataatcttatatctgggagactgaaccactccagcttctatgagttctgtgggggatgatcccttcacgactgagcgggctggcaaggc

SEQ ID NO: 545 - DNA, 495 bp, Artificial Sequence
  source: /note="Description of Artificial Sequence: Synthetic polynucleotide"
gcctccctcgcgccatcagcgccaatacttcacgaccgccgccttccacctgaatcccgccgcccgggtggtcccgcgaaaactcacccagcacggtcagcctgctgccggccccgaaagtcaggacgttggcccgtcgaccgccaatacttcacgatcactgctggcacagagatacacggccgagtccccaagctctgcaggctggatcttgagagtggagtctactcctttgagcctctctgcagaaaatcgatccttaggcaactgtgaatcgtctactgcttcctcattctcatatcgaatcagaagctccgggccctgtcccaagttctgcaggtaccagtaaagggtattgtggccagaaataggattgcaccaaaaagccacaggctgttttttctctataatcttatatctgggagactgaaccactccagcttctatgagttctgtggggcgccaatacttcacgactgagcgggctggcaaggc

SEQ ID NO: 546 - DNA, 495 bp, Artificial Sequence
  source: /note="Description of Artificial Sequence: Synthetic polynucleotide"
gcctccctcgcgccatcagtcaagcctcttcacgaccaccctccgactccggggaccgaggggctggaaggtggggagacgcccgaatctcacctgtgaccgtgagcctggtgcccggcccgaagtactgctcgtgtcgactcaagcctcttcacgatcactgctggcacagagatacacggccgagtccccaagctctgcaggctggatcttgagagtggagtctactcctttgagcctctctgcagaaaatcgatccttaggcaactgtgaatcgtctactgcttcctcattctcatatcgaatcagaagctccgggccctgtcccaagttctgcaggtaccagtaaagggtattgtggccagaaataggattgcaccaaaaagccacaggctgttttttctctataatcttatatctgggagactgaaccactccagcttctatgagttctgtggggtcaagcctcttcacgactgagcgggctggcaaggc

SEQ ID NO: 547 - DNA, 495 bp, Artificial Sequence
  source: /note="Description of Artificial Sequence: Synthetic polynucleotide"
gcctccctcgcgccatcagagagtgtcagctagtgctgtggacccacttttccctgtgacggatctgcaaaagaacctgaaaaatgtcttacctacaactgtgagtctggtgccttgtccaaagaaagcttcagtgtcgacagagtgtcagctagtgtcactgctggcacagaaatataggcccaagtccctgggttccatgggctggatcctcagagtggagaatgatacatcaggcatctgtgctgagaatcaatccttggacactcctgagtcatctacgagggtccagctgcagaagtaattcagcaattccagtccctgcacaaaggtctgtctgtaccagagaagatcattgtggcctgaaattggttcgcatctcagagttactgattgtcccatctctgtcactttgtgcctgggtgactggataacaccagcatctgtgtgtgctataaaaagagtgtcagctagtgctgagcgggctggcaaggc

SEQ ID NO: 548 - DNA, 495 bp, Artificial Sequence
  source: /note="Description of Artificial Sequence: Synthetic polynucleotide"
gcctccctcgcgccatcaggttccgaaagctagtgatttcccaggacagagtcctccctcatcgcacccctcctagagacccccagccttacctacaacggttaacctggtccccgaaccgaaggtgtagccatagtcgacgttccgaaagctagtgtcactgctggcacagaaatataggcccaagtccctgggttccatgggctggatcctcagagtggagaatgatacatcaggcatctgtgctgagaatcaatccttggacactcctgagtcatctacgagggtccagctgcagaagtaattcagcaattccagtccctgcacaaaggtctgtctgtaccagagaagatcattgtggcctgaaattggttcgcatctcagagttactgattgtcccatctctgtcactttgtgcctgggtgactggataacaccagcatctgtgtgtgctataaaagttccgaaagctagtgctgagcgggctggcaaggc

SEQ ID NO: 549 - DNA, 495 bp, Artificial Sequence
  source: /note="Description of Artificial Sequence: Synthetic polynucleotide"
gcctccctcgcgccatcagcgttacttagctagtgctggattccagcccctttttgcaagttcccagctgtccagccttgacttactcacctacaacagtgagccaacttccctctccaaaatatatggtgtttcgtcgaccgttacttagctagtgtcactgctggcacagaaatataggcccaagtccctgggttccatgggctggatcctcagagtggagaatgatacatcaggcatctgtgctgagaatcaatccttggacactcctgagtcatctacgagggtccagctgcagaagtaattcagcaattccagtccctgcacaaaggtctgtctgtaccagagaagatcattgtggcctgaaattggttcgcatctcagagttactgattgtcccatctctgtcactttgtgcctgggtgactggataacaccagcatctgtgtgtgctataaaacgttacttagctagtgctgagcgggctggcaaggc

SEQ ID NO: 550 - DNA, 495 bp, Artificial Sequence
  source: /note="Description of Artificial Sequence: Synthetic polynucleotide"
gcctccctcgcgccatcagtaggagacagctagtgctcctggaactccgaccttatgatacactatcccgaaagaagtcttttacatacccaagacagagagctgggttccactgccaaaaaacagtttttcattgtcgactaggagacagctagtgtcactgctggcacagaaatataggcccaagtccctgggttccatgggctggatcctcagagtggagaatgatacatcaggcatctgtgctgagaatcaatccttggacactcctgagtcatctacgagggtccagctgcagaagtaattcagcaattccagtccctgcacaaaggtctgtctgtaccagagaagatcattgtggcctgaaattggttcgcatctcagagttactgattgtcccatctctgtcactttgtgcctgggtgactggataacaccagcatctgtgtgtgctataaaataggagacagctagtgctgagcgggctggcaaggc

SEQ ID NO: 551 - DNA, 495 bp, Artificial Sequence
  source: /note="Description of Artificial Sequence: Synthetic polynucleotide"
gcctccctcgcgccatcaggacactctagctagtgagagaactctgccttcaagggacaatggccataccaccctgattctgcaacttacctaggatggagagtcgagtcccatcaccaaaatgctggggctgatgtcgacgacactctagctagtgtcactgctggcacagaaatataggcccaagtccctgggttccatgggctggatcctcagagtggagaatgatacatcaggcatctgtgctgagaatcaatccttggacactcctgagtcatctacgagggtccagctgcagaagtaattcagcaattccagtccctgcacaaaggtctgtctgtaccagagaagatcattgtggcctgaaattggttcgcatctcagagttactgattgtcccatctctgtcactttgtgcctgggtgactggataacaccagcatctgtgtgtgctataaaagacactctagctagtgctgagcgggctggcaaggc

SEQ ID NO: 552 - DNA, 495 bp, Artificial Sequence
  source: /note="Description of Artificial Sequence: Synthetic polynucleotide"
gcctccctcgcgccatcagttcggaacagctagtgatcattgcagtcaaacccaggcacccccgagtcaagagtggagcccccatacctgtcacagtgagcctggtcccgttcccaaagtggaggggtgaattatgtcgacttcggaacagctagtgtcactgctggcacagaaatataggcccaagtccctgggttccatgggctggatcctcagagtggagaatgatacatcaggcatctgtgctgagaatcaatccttggacactcctgagtcatctacgagggtccagctgcagaagtaattcagcaattccagtccctgcacaaaggtctgtctgtaccagagaagatcattgtggcctgaaattggttcgcatctcagagttactgattgtcccatctctgtcactttgtgcctgggtgactggataacaccagcatctgtgtgtgctataaaattcggaacagctagtgctgagcgggctggcaaggc

SEQ ID NO: 553 - DNA, 495 bp, Artificial Sequence
  source: /note="Description of Artificial Sequence: Synthetic polynucleotide"
gcctccctcgcgccatcagaagtaacgagctagtggggtcgtgcaggctgggctgctcaccctctctcccacctggagcccccttcttacctagcacggtgagccgtgtccctggcccgaagaactgctcattgtgtcgacaagtaacgagctagtgtcactgctggcacagaaatataggcccaagtccctgggttccatgggctggatcctcagagtggagaatgatacatcaggcatctgtgctgagaatcaatccttggacactcctgagtcatctacgagggtccagctgcagaagtaattcagcaattccagtccctgcacaaaggtctgtctgtaccagagaagatcattgtggcctgaaattggttcgcatctcagagttactgattgtcccatctctgtcactttgtgcctgggtgactggataacaccagcatctgtgtgtgctataaaaaagtaacgagctagtgctgagcgggctggcaaggc

SEQ ID NO: 554 - DNA, 495 bp, Artificial Sequence
  source: /note="Description of Artificial Sequence: Synthetic polynucleotide"
gcctccctcgcgccatcaggtctcctaagctagtgcctctgcccatcccgccctctcggagctctccggagccccaaccgcctccttacccagtacggtcagcctagagccttctccaaaaaacagctccccggtgtcgacgtctcctaagctagtgtcactgctggcacagaaatataggcccaagtccctgggttccatgggctggatcctcagagtggagaatgatacatcaggcatctgtgctgagaatcaatccttggacactcctgagtcatctacgagggtccagctgcagaagtaattcagcaattccagtccctgcacaaaggtctgtctgtaccagagaagatcattgtggcctgaaattggttcgcatctcagagttactgattgtcccatctctgtcactttgtgcctgggtgactggataacaccagcatctgtgtgtgctataaaagtctcctaagctagtgctgagcgggctggcaaggc

SEQ ID NO: 555 - DNA, 495 bp, Artificial Sequence
  source: /note="Description of Artificial Sequence: Synthetic polynucleotide"
gcctccctcgcgccatcaggtagacacagctagtggcgtcccggggcgccccctccccagttccggggcttcagcgggagcccccgcttaccgagcactgtcagccgggtgcctgggccaaaatactgcgtatctgtcgacgtagacacagctagtgtcactgctggcacagaaatataggcccaagtccctgggttccatgggctggatcctcagagtggagaatgatacatcaggcatctgtgctgagaatcaatccttggacactcctgagtcatctacgagggtccagctgcagaagtaattcagcaattccagtccctgcacaaaggtctgtctgtaccagagaagatcattgtggcctgaaattggttcgcatctcagagttactgattgtcccatctctgtcactttgtgcctgggtgactggataacaccagcatctgtgtgtgctataaaagtagacacagctagtgctgagcgggctggcaaggc

SEQ ID NO: 556 - DNA, 495 bp, Artificial Sequence
  source: /note="Description of Artificial Sequence: Synthetic polynucleotide"
gcctccctcgcgccatcagcactgtacagctagtgcgcacaaaaacccgagcgcagtctcgtccccggtcccccggcggccccagcttacccagcactgagagccgggtcccggcgccgaagtactgaatgttttgtcgaccactgtacagctagtgtcactgctggcacagaaatataggcccaagtccctgggttccatgggctggatcctcagagtggagaatgatacatcaggcatctgtgctgagaatcaatccttggacactcctgagtcatctacgagggtccagctgcagaagtaattcagcaattccagtccctgcacaaaggtctgtctgtaccagagaagatcattgtggcctgaaattggttcgcatctcagagttactgattgtcccatctctgtcactttgtgcctgggtgactggataacaccagcatctgtgtgtgctataaaacactgtacagctagtgctgagcgggctggcaaggc

SEQ ID NO: 557 - DNA, 495 bp, Artificial Sequence
  source: /note="Description of Artificial Sequence: Synthetic polynucleotide"
gcctccctcgcgccatcaggatgatccagctagtgccccgcaaaaaccagacccaagccgcccgcgcccgcgccccagcagcccgcgctcaccgagcaccaggagccgcgtgcctggcccgaagtactgggtctcgtcgacgatgatccagctagtgtcactgctggcacagaaatataggcccaagtccctgggttccatgggctggatcctcagagtggagaatgatacatcaggcatctgtgctgagaatcaatccttggacactcctgagtcatctacgagggtccagctgcagaagtaattcagcaattccagtccctgcacaaaggtctgtctgtaccagagaagatcattgtggcctgaaattggttcgcatctcagagttactgattgtcccatctctgtcactttgtgcctgggtgactggataacaccagcatctgtgtgtgctataaaagatgatccagctagtgctgagcgggctggcaaggc

SEQ ID NO: 558 - DNA, 495 bp, Artificial Sequence
  source: /note="Description of Artificial Sequence: Synthetic polynucleotide"
gcctccctcgcgccatcagcgccaataagctagtgccgccgccttccacctgaatcccgccgcccgggtggtcccgcgaaaactcacccagcacggtcagcctgctgccggccccgaaagtcaggacgttggcccgtcgaccgccaataagctagtgtcactgctggcacagaaatataggcccaagtccctgggttccatgggctggatcctcagagtggagaatgatacatcaggcatctgtgctgagaatcaatccttggacactcctgagtcatctacgagggtccagctgcagaagtaattcagcaattccagtccctgcacaaaggtctgtctgtaccagagaagatcattgtggcctgaaattggttcgcatctcagagttactgattgtcccatctctgtcactttgtgcctgggtgactggataacaccagcatctgtgtgtgctataaaacgccaataagctagtgctgagcgggctggcaaggc

SEQ ID NO: 559 - DNA, 495 bp, Artificial Sequence
  source: /note="Description of Artificial Sequence: Synthetic polynucleotide"
gcctccctcgcgccatcagtcaagcctagctagtgccaccctccgactccggggaccgaggggctggaaggtggggagacgcccgaatctcacctgtgaccgtgagcctggtgcccggcccgaagtactgctcgtgtcgactcaagcctagctagtgtcactgctggcacagaaatataggcccaagtccctgggttccatgggctggatcctcagagtggagaatgatacatcaggcatctgtgctgagaatcaatccttggacactcctgagtcatctacgagggtccagctgcagaagtaattcagcaattccagtccctgcacaaaggtctgtctgtaccagagaagatcattgtggcctgaaattggttcgcatctcagagttactgattgtcccatctctgtcactttgtgcctgggtgactggataacaccagcatctgtgtgtgctataaaatcaagcctagctagtgctgagcgggctggcaaggc

SEQ ID NO: 560 - DNA, 495 bp, Artificial Sequence
  source: /note="Description of Artificial Sequence: Synthetic polynucleotide"
gcctccctcgcgccatcagagagtgtctaaccaagctgtggacccacttttccctgtgacggatctgcaaaagaacctgaaaaatgtcttacctacaactgtgagtctggtgccttgtccaaagaaagcttcagtgtcgacagagtgtctaaccaagtcacgacttgcacagacatacacggccgagtccccctgctctgcaggctggatcttcagagtagagaatgatccatcaggcctctcagctgagaatcgctctgtgggcatacctgcattatctataatagatcagctccggaagtaactcagcaattccagtccctgcacgaaggtatctctgtaccagaaaaggaaattgtggccaaaaattggctcacatctcagagtcactgtttgtcccatttctgtcacctcatgcttgggtgactggataatgccagcatctgtgcatgctataaaaagagtgtctaaccaagctgagcgggctggcaaggc

SEQ ID NO: 561 - DNA, 495 bp, Artificial Sequence
  source: /note="Description of Artificial Sequence: Synthetic polynucleotide"
gcctccctcgcgccatcaggttccgaataaccaagatttcccaggacagagtcctccctcatcgcacccctcctagagacccccagccttacctacaacggttaacctggtccccgaaccgaaggtgtagccatagtcgacgttccgaataaccaagtcacgacttgcacagacatacacggccgagtccccctgctctgcaggctggatcttcagagtagagaatgatccatcaggcctctcagctgagaatcgctctgtgggcatacctgcattatctataatagatcagctccggaagtaactcagcaattccagtccctgcacgaaggtatctctgtaccagaaaaggaaattgtggccaaaaattggctcacatctcagagtcactgtttgtcccatttctgtcacctcatgcttgggtgactggataatgccagcatctgtgcatgctataaaagttccgaataaccaagctgagcgggctggcaaggc

SEQ ID NO: 562 - DNA, 495 bp, Artificial Sequence
  source: /note="Description of Artificial Sequence: Synthetic polynucleotide"
gcctccctcgcgccatcagcgttactttaaccaagctggattccagcccctttttgcaagttcccagctgtccagccttgacttactcacctacaacagtgagccaacttccctctccaaaatatatggtgtttcgtcgaccgttactttaaccaagtcacgacttgcacagacatacacggccgagtccccctgctctgcaggctggatcttcagagtagagaatgatccatcaggcctctcagctgagaatcgctctgtgggcatacctgcattatctataatagatcagctccggaagtaactcagcaattccagtccctgcacgaaggtatctctgtaccagaaaaggaaattgtggccaaaaattggctcacatctcagagtcactgtttgtcccatttctgtcacctcatgcttgggtgactggataatgccagcatctgtgcatgctataaaacgttactttaaccaagctgagcgggctggcaaggc

SEQ ID NO: 563 - DNA, 495 bp, Artificial Sequence
  source: /note="Description of Artificial Sequence: Synthetic polynucleotide"
gcctccctcgcgccatcagtaggagactaaccaagctcctggaactccgaccttatgatacactatcccgaaagaagtcttttacatacccaagacagagagctgggttccactgccaaaaaacagtttttcattgtcgactaggagactaaccaagtcacgacttgcacagacatacacggccgagtccccctgctctgcaggctggatcttcagagtagagaatgatccatcaggcctctcagctgagaatcgctctgtgggcatacctgcattatctataatagatcagctccggaagtaactcagcaattccagtccctgcacgaaggtatctctgtaccagaaaaggaaattgtggccaaaaattggctcacatctcagagtcactgtttgtcccatttctgtcacctcatgcttgggtgactggataatgccagcatctgtgcatgctataaaataggagactaaccaagctgagcgggctggcaaggc

SEQ ID NO: 564 - DNA, 495 bp, Artificial Sequence
  source: /note="Description of Artificial Sequence: Synthetic polynucleotide"
gcctccctcgcgccatcaggacactcttaaccaagagagaactctgccttcaagggacaatggccataccaccctgattctgcaacttacctaggatggagagtcgagtcccatcaccaaaatgctggggctgatgtcgacgacactcttaaccaagtcacgacttgcacagacatacacggccgagtccccctgctctgcaggctggatcttcagagtagagaatgatccatcaggcctctcagctgagaatcgctctgtgggcatacctgcattatctataatagatcagctccggaagtaactcagcaattccagtccctgcacgaaggtatctctgtaccagaaaaggaaattgtggccaaaaattggctcacatctcagagtcactgtttgtcccatttctgtcacctcatgcttgggtgactggataatgccagcatctgtgcatgctataaaagacactcttaaccaagctgagcgggctggcaaggc

SEQ ID NO: 565 - DNA, 495 bp, Artificial Sequence
  source: /note="Description of Artificial Sequence: Synthetic polynucleotide"
gcctccctcgcgccatcagttcggaactaaccaagatcattgcagtcaaacccaggcacccccgagtcaagagtggagcccccatacctgtcacagtgagcctggtcccgttcccaaagtggaggggtgaattatgtcgacttcggaactaaccaagtcacgacttgcacagacatacacggccgagtccccctgctctgcaggctggatcttcagagtagagaatgatccatcaggcctctcagctgagaatcgctctgtgggcatacctgcattatctataatagatcagctccggaagtaactcagcaattccagtccctgcacgaaggtatctctgtaccagaaaaggaaattgtggccaaaaattggctcacatctcagagtcactgtttgtcccatttctgtcacctcatgcttgggtgactggataatgccagcatctgtgcatgctataaaattcggaactaaccaagctgagcgggctggcaaggc

SEQ ID NO: 566 - DNA, 495 bp, Artificial Sequence
  source: /note="Description of Artificial Sequence: Synthetic polynucleotide"
gcctccctcgcgccatcagaagtaacgtaaccaaggggtcgtgcaggctgggctgctcaccctctctcccacctggagcccccttcttacctagcacggtgagccgtgtccctggcccgaagaactgctcattgtgtcgacaagtaacgtaaccaagtcacgacttgcacagacatacacggccgagtccccctgctctgcaggctggatcttcagagtagagaatgatccatcaggcctctcagctgagaatcgctctgtgggcatacctgcattatctataatagatcagctccggaagtaactcagcaattccagtccctgcacgaaggtatctctgtaccagaaaaggaaattgtggccaaaaattggctcacatctcagagtcactgtttgtcccatttctgtcacctcatgcttgggtgactggataatgccagcatctgtgcatgctataaaaaagtaacgtaaccaagctgagcgggctggcaaggc

SEQ ID NO: 567 - DNA, 495 bp, Artificial Sequence
  source: /note="Description of Artificial Sequence: Synthetic polynucleotide"
gcctccctcgcgccatcaggtctcctataaccaagcctctgcccatcccgccctctcggagctctccggagccccaaccgcctccttacccagtacggtcagcctagagccttctccaaaaaacagctccccggtgtcgacgtctcctataaccaagtcacgacttgcacagacatacacggccgagtccccctgctctgcaggctggatcttcagagtagagaatgatccatcaggcctctcagctgagaatcgctctgtgggcatacctgcattatctataatagatcagctccggaagtaactcagcaattccagtccctgcacgaaggtatctctgtaccagaaaaggaaattgtggccaaaaattggctcacatctcagagtcactgtttgtcccatttctgtcacctcatgcttgggtgactggataatgccagcatctgtgcatgctataaaagtctcctataaccaagctgagcgggctggcaaggc

SEQ ID NO: 568 - DNA, 495 bp, Artificial Sequence
  source: /note="Description of Artificial Sequence: Synthetic polynucleotide"
gcctccctcgcgccatcaggtagacactaaccaaggcgtcccggggcgccccctccccagttccggggcttcagcgggagcccccgcttaccgagcactgtcagccgggtgcctgggccaaaatactgcgtatctgtcgacgtagacactaaccaagtcacgacttgcacagacatacacggccgagtccccctgctctgcaggctggatcttcagagtagagaatgatccatcaggcctctcagctgagaatcgctctgtgggcatacctgcattatctataatagatcagctccggaagtaactcagcaattccagtccctgcacgaaggtatctctgtaccagaaaaggaaattgtggccaaaaattggctcacatctcagagtcactgtttgtcccatttctgtcacctcatgcttgggtgactggataatgccagcatctgtgcatgctataaaagtagacactaaccaagctgagcgggctggcaaggc

SEQ ID NO: 569 - DNA, 495 bp, Artificial Sequence
  source: /note="Description of Artificial Sequence: Synthetic polynucleotide"
gcctccctcgcgccatcagcactgtactaaccaagcgcacaaaaacccgagcgcagtctcgtccccggtcccccggcggccccagcttacccagcactgagagccgggtcccggcgccgaagtactgaatgttttgtcgaccactgtactaaccaagtcacgacttgcacagacatacacggccgagtccccctgctctgcaggctggatcttcagagtagagaatgatccatcaggcctctcagctgagaatcgctctgtgggcatacctgcattatctataatagatcagctccggaagtaactcagcaattccagtccctgcacgaaggtatctctgtaccagaaaaggaaattgtggccaaaaattggctcacatctcagagtcactgtttgtcccatttctgtcacctcatgcttgggtgactggataatgccagcatctgtgcatgctataaaacactgtactaaccaagctgagcgggctggcaaggc

SEQ ID NO: 570 - DNA, 495 bp, Artificial Sequence
  source: /note="Description of Artificial Sequence: Synthetic polynucleotide"
gcctccctcgcgccatcaggatgatcctaaccaagccccgcaaaaaccagacccaagccgcccgcgcccgcgccccagcagcccgcgctcaccgagcaccaggagccgcgtgcctggcccgaagtactgggtctcgtcgacgatgatcctaaccaagtcacgacttgcacagacatacacggccgagtccccctgctctgcaggctggatcttcagagtagagaatgatccatcaggcctctcagctgagaatcgctctgtgggcatacctgcattatctataatagatcagctccggaagtaactcagcaattccagtccctgcacgaaggtatctctgtaccagaaaaggaaattgtggccaaaaattggctcacatctcagagtcactgtttgtcccatttctgtcacctcatgcttgggtgactggataatgccagcatctgtgcatgctataaaagatgatcctaaccaagctgagcgggctggcaaggc

SEQ ID NO: 571 - DNA, 495 bp, Artificial Sequence
  source: /note="Description of Artificial Sequence: Synthetic polynucleotide"
gcctccctcgcgccatcagcgccaatataaccaagccgccgccttccacctgaatcccgccgcccgggtggtcccgcgaaaactcacccagcacggtcagcctgctgccggccccgaaagtcaggacgttggcccgtcgaccgccaatataaccaagtcacgacttgcacagacatacacggccgagtccccctgctctgcaggctggatcttcagagtagagaatgatccatcaggcctctcagctgagaatcgctctgtgggcatacctgcattatctataatagatcagctccggaagtaactcagcaattccagtccctgcacgaaggtatctctgtaccagaaaaggaaattgtggccaaaaattggctcacatctcagagtcactgtttgtcccatttctgtcacctcatgcttgggtgactggataatgccagcatctgtgcatgctataaaacgccaatataaccaagctgagcgggctggcaaggc

SEQ ID NO: 572 - DNA, 495 bp, Artificial Sequence
  source: /note="Description of Artificial Sequence: Synthetic polynucleotide"
gcctccctcgcgccatcagtcaagccttaaccaagccaccctccgactccggggaccgaggggctggaaggtggggagacgcccgaatctcacctgtgaccgtgagcctggtgcccggcccgaagtactgctcgtgtcgactcaagccttaaccaagtcacgacttgcacagacatacacggccgagtccccctgctctgcaggctggatcttcagagtagagaatgatccatcaggcctctcagctgagaatcgctctgtgggcatacctgcattatctataatagatcagctccggaagtaactcagcaattccagtccctgcacgaaggtatctctgtaccagaaaaggaaattgtggccaaaaattggctcacatctcagagtcactgtttgtcccatttctgtcacctcatgcttgggtgactggataatgccagcatctgtgcatgctataaaatcaagccttaaccaagctgagcgggctggcaaggc

SEQ ID NO: 573 - DNA, 495 bp, Artificial Sequence
  source: /note="Description of Artificial Sequence: Synthetic polynucleotide"
gcctccctcgcgccatcagagagtgtccaagaggtctgtggacccacttttccctgtgacggatctgcaaaagaacctgaaaaatgtcttacctacaactgtgagtctggtgccttgtccaaagaaagcttcagtgtcgacagagtgtccaagaggttcactgctggcacagaagtacacagctgagtccctgggttctgagggctggatcttcagagtggagaatgatgcattaggcatcttagctgagaatcgatcctcgggcatccctgaatcatctatcggaacgttgttgttaaagtaaatgagcaactccagtccccgcatcatggtctgtctgtaccagaaaagggagttgtggcctgaaattggtttacatctcagagtcacttcttgtcccatctctgtcacctcatggcggggtgactggataactccagcatctgtatgctctatgaaaagagtgtccaagaggtctgagcgggctggcaaggc

SEQ ID NO: 574 - DNA, 495 bp, Artificial Sequence
  source: /note="Description of Artificial Sequence: Synthetic polynucleotide"
gcctccctcgcgccatcaggttccgaacaagaggtatttcccaggacagagtcctccctcatcgcacccctcctagagacccccagccttacctacaacggttaacctggtccccgaaccgaaggtgtagccatagtcgacgttccgaacaagaggttcactgctggcacagaagtacacagctgagtccctgggttctgagggctggatcttcagagtggagaatgatgcattaggcatcttagctgagaatcgatcctcgggcatccctgaatcatctatcggaacgttgttgttaaagtaaatgagcaactccagtccccgcatcatggtctgtctgtaccagaaaagggagttgtggcctgaaattggtttacatctcagagtcacttcttgtcccatctctgtcacctcatggcggggtgactggataactccagcatctgtatgctctatgaaagttccgaacaagaggtctgagcgggctggcaaggc

SEQ ID NO: 575 - DNA, 495 bp, Artificial Sequence
  source: /note="Description of Artificial Sequence: Synthetic polynucleotide"
gcctccctcgcgccatcagcgttacttcaagaggtctggattccagcccctttttgcaagttcccagctgtccagccttgacttactcacctacaacagtgagccaacttccctctccaaaatatatggtgtttcgtcgaccgttacttcaagaggttcactgctggcacagaagtacacagctgagtccctgggttctgagggctggatcttcagagtggagaatgatgcattaggcatcttagctgagaatcgatcctcgggcatccctgaatcatctatcggaacgttgttgttaaagtaaatgagcaactccagtccccgcatcatggtctgtctgtaccagaaaagggagttgtggcctgaaattggtttacatctcagagtcacttcttgtcccatctctgtcacctcatggcggggtgactggataactccagcatctgtatgctctatgaaacgttacttcaagaggtctgagcgggctggcaaggc

SEQ ID NO: 576 - DNA, 495 bp, Artificial Sequence
  source: /note="Description of Artificial Sequence: Synthetic polynucleotide"
gcctccctcgcgccatcagtaggagaccaagaggtctcctggaactccgaccttatgatacactatcccgaaagaagtcttttacatacccaagacagagagctgggttccactgccaaaaaacagtttttcattgtcgactaggagaccaagaggttcactgctggcacagaagtacacagctgagtccctgggttctgagggctggatcttcagagtggagaatgatgcattaggcatcttagctgagaatcgatcctcgggcatccctgaatcatctatcggaacgttgttgttaaagtaaatgagcaactccagtccccgcatcatggtctgtctgtaccagaaaagggagttgtggcctgaaattggtttacatctcagagtcacttcttgtcccatctctgtcacctcatggcggggtgactggataactccagcatctgtatgctctatgaaataggagaccaagaggtctgagcgggctggcaaggc

SEQ ID NO: 577 - DNA, 495 bp, Artificial Sequence
  source: /note="Description of Artificial Sequence: Synthetic polynucleotide"
gcctccctcgcgccatcaggacactctcaagaggtagagaactctgccttcaagggacaatggccataccaccctgattctgcaacttacctaggatggagagtcgagtcccatcaccaaaatgctggggctgatgtcgacgacactctcaagaggttcactgctggcacagaagtacacagctgagtccctgggttctgagggctggatcttcagagtggagaatgatgcattaggcatcttagctgagaatcgatcctcgggcatccctgaatcatctatcggaacgttgttgttaaagtaaatgagcaactccagtccccgcatcatggtctgtctgtaccagaaaagggagttgtggcctgaaattggtttacatctcagagtcacttcttgtcccatctctgtcacctcatggcggggtgactggataactccagcatctgtatgctctatgaaagacactctcaagaggtctgagcgggctggcaaggc

SEQ ID NO: 578 - DNA, 495 bp, Artificial Sequence
  source: /note="Description of Artificial Sequence: Synthetic polynucleotide"
gcctccctcgcgccatcagttcggaaccaagaggtatcattgcagtcaaacccaggcacccccgagtcaagagtggagcccccatacctgtcacagtgagcctggtcccgttcccaaagtggaggggtgaattatgtcgacttcggaaccaagaggttcactgctggcacagaagtacacagctgagtccctgggttctgagggctggatcttcagagtggagaatgatgcattaggcatcttagctgagaatcgatcctcgggcatccctgaatcatctatcggaacgttgttgttaaagtaaatgagcaactccagtccccgcatcatggtctgtctgtaccagaaaagggagttgtggcctgaaattggtttacatctcagagtcacttcttgtcccatctctgtcacctcatggcggggtgactggataactccagcatctgtatgctctatgaaattcggaaccaagaggtctgagcgggctggcaaggc

SEQ ID NO: 579 - DNA, 495 bp, Artificial Sequence
  source: /note="Description of Artificial Sequence: Synthetic polynucleotide"
gcctccctcgcgccatcagaagtaacgcaagaggtgggtcgtgcaggctgggctgctcaccctctctcccacctggagcccccttcttacctagcacggtgagccgtgtccctggcccgaagaactgctcattgtgtcgacaagtaacgcaagaggttcactgctggcacagaagtacacagctgagtccctgggttctgagggctggatcttcagagtggagaatgatgcattaggcatcttagctgagaatcgatcctcgggcatccctgaatcatctatcggaacgttgttgttaaagtaaatgagcaactccagtccccgcatcatggtctgtctgtaccagaaaagggagttgtggcctgaaattggtttacatctcagagtcacttcttgtcccatctctgtcacctcatggcggggtgactggataactccagcatctgtatgctctatgaaaaagtaacgcaagaggtctgagcgggctggcaaggc

SEQ ID NO: 580 - DNA, 495 bp, Artificial Sequence
  source: /note="Description of Artificial Sequence: Synthetic polynucleotide"
gcctccctcgcgccatcaggtctcctacaagaggtcctctgcccatcccgccctctcggagctctccggagccccaaccgcctccttacccagtacggtcagcctagagccttctccaaaaaacagctccccggtgtcgacgtctcctacaagaggttcactgctggcacagaagtacacagctgagtccctgggttctgagggctggatcttcagagtggagaatgatgcattaggcatcttagctgagaatcgatcctcgggcatccctgaatcatctatcggaacgttgttgttaaagtaaatgagcaactccagtccccgcatcatggtctgtctgtaccagaaaagggagttgtggcctgaaattggtttacatctcagagtcacttcttgtcccatctctgtcacctcatggcggggtgactggataactccagcatctgtatgctctatgaaagtctcctacaagaggtctgagcgggctggcaaggc

SEQ ID NO: 581 - DNA, 495 bp, Artificial Sequence
  source: /note="Description of Artificial Sequence: Synthetic polynucleotide"
gcctccctcgcgccatcaggtagacaccaagaggtgcgtcccggggcgccccctccccagttccggggcttcagcgggagcccccgcttaccgagcactgtcagccgggtgcctgggccaaaatactgcgtatctgtcgacgtagacaccaagaggttcactgctggcacagaagtacacagctgagtccctgggttctgagggctggatcttcagagtggagaatgatgcattaggcatcttagctgagaatcgatcctcgggcatccctgaatcatctatcggaacgttgttgttaaagtaaatgagcaactccagtccccgcatcatggtctgtctgtaccagaaaagggagttgtggcctgaaattggtttacatctcagagtcacttcttgtcccatctctgtcacctcatggcggggtgactggataactccagcatctgtatgctctatgaaagtagacaccaagaggtctgagcgggctggcaaggc

SEQ ID NO: 582 - DNA, 495 bp, Artificial Sequence
  source: /note="Description of Artificial Sequence: Synthetic polynucleotide"
gcctccctcgcgccatcagcactgtaccaagaggtcgcacaaaaacccgagcgcagtctcgtccccggtcccccggcggccccagcttacccagcactgagagccgggtcccggcgccgaagtactgaatgttttgtcgaccactgtaccaagaggttcactgctggcacagaagtacacagctgagtccctgggttctgagggctggatcttcagagtggagaatgatgcattaggcatcttagctgagaatcgatcctcgggcatccctgaatcatctatcggaacgttgttgttaaagtaaatgagcaactccagtccccgcatcatggtctgtctgtaccagaaaagggagttgtggcctgaaattggtttacatctcagagtcacttcttgtcccatctctgtcacctcatggcggggtgactggataactccagcatctgtatgctctatgaaacactgtaccaagaggtctgagcgggctggcaaggc

SEQ ID NO: 583 - DNA, 495 bp, Artificial Sequence
  source: /note="Description of Artificial Sequence: Synthetic polynucleotide"
gcctccctcgcgccatcaggatgatcccaagaggtccccgcaaaaaccagacccaagccgcccgcgcccgcgccccagcagcccgcgctcaccgagcaccaggagccgcgtgcctggcccgaagtactgggtctcgtcgacgatgatcccaagaggttcactgctggcacagaagtacacagctgagtccctgggttctgagggctggatcttcagagtggagaatgatgcattaggcatcttagctgagaatcgatcctcgggcatccctgaatcatctatcggaacgttgttgttaaagtaaatgagcaactccagtccccgcatcatggtctgtctgtaccagaaaagggagttgtggcctgaaattggtttacatctcagagtcacttcttgtcccatctctgtcacctcatggcggggtgactggataactccagcatctgtatgctctatgaaagatgatcccaagaggtctgagcgggctggcaaggc

SEQ ID NO: 584 - DNA, 495 bp, Artificial Sequence
  source: /note="Description of Artificial Sequence: Synthetic polynucleotide"
gcctccctcgcgccatcagcgccaatacaagaggtccgccgccttccacctgaatcccgccgcccgggtggtcccgcgaaaactcacccagcacggtcagcctgctgccggccccgaaagtcaggacgttggcccgtcgaccgccaatacaagaggttcactgctggcacagaagtacacagctgagtccctgggttctgagggctggatcttcagagtggagaatgatgcattaggcatcttagctgagaatcgatcctcgggcatccctgaatcatctatcggaacgttgttgttaaagtaaatgagcaactccagtccccgcatcatggtctgtctgtaccagaaaagggagttgtggcctgaaattggtttacatctcagagtcacttcttgtcccatctctgtcacctcatggcggggtgactggataactccagcatctgtatgctctatgaaacgccaatacaagaggtctgagcgggctggcaaggc

SEQ ID NO: 585 - DNA, 495 bp, Artificial Sequence
  source: /note="Description of Artificial Sequence: Synthetic polynucleotide"
gcctccctcgcgccatcagtcaagcctcaagaggtccaccctccgactccggggaccgaggggctggaaggtggggagacgcccgaatctcacctgtgaccgtgagcctggtgcccggcccgaagtactgctcgtgtcgactcaagcctcaagaggttcactgctggcacagaagtacacagctgagtccctgggttctgagggctggatcttcagagtggagaatgatgcattaggcatcttagctgagaatcgatcctcgggcatccctgaatcatctatcggaacgttgttgttaaagtaaatgagcaactccagtccccgcatcatggtctgtctgtaccagaaaagggagttgtggcctgaaattggtttacatctcagagtcacttcttgtcccatctctgtcacctcatggcggggtgactggataactccagcatctgtatgctctatgaaatcaagcctcaagaggtctgagcgggctggcaaggc

SEQ ID NO: 586 - DNA, 495 bp, Artificial Sequence
  source: /note="Description of Artificial Sequence: Synthetic polynucleotide"
gcctccctcgcgccatcagagagtgtcagaatcagctgtggacccacttttccctgtgacggatctgcaaaagaacctgaaaaatgtcttacctacaactgtgagtctggtgccttgtccaaagaaagcttcagtgtcgacagagtgtcagaatcagtcactgctggcacagaagtacacagctgagtccctgggttctgagggctggatcttcagagtggagaatgatgcattaggcatcttagctgagaatcgatcctcgggcatccctgaatcatctatcggaacgttgttgttaaagtaaatgagcaactccagtccccgcatcatggtctgtctgtaccagaaaaggtagtcgtgtcctgaaattggtttacatctcagagtcacttcttgtcccatctctgtcacctcgtgccggggtgactggataactccagcatctgtgtgctctatgaagagagtgtcagaatcagctgagcgggctggcaaggc

SEQ ID NO: 587 - DNA, 495 bp, Artificial Sequence
  source: /note="Description of Artificial Sequence: Synthetic polynucleotide"
gcctccctcgcgccatcaggttccgaaagaatcagatttcccaggacagagtcctccctcatcgcacccctcctagagacccccagccttacctacaacggttaacctggtccccgaaccgaaggtgtagccatagtcgacgttccgaaagaatcagtcactgctggcacagaagtacacagctgagtccctgggttctgagggctggatcttcagagtggagaatgatgcattaggcatcttagctgagaatcgatcctcgggcatccctgaatcatctatcggaacgttgttgttaaagtaaatgagcaactccagtccccgcatcatggtctgtctgtaccagaaaaggtagtcgtgtcctgaaattggtttacatctcagagtcacttcttgtcccatctctgtcacctcgtgccggggtgactggataactccagcatctgtgtgctctatgaaggttccgaaagaatcagctgagcgggctggcaaggc

SEQ ID NO: 588 - DNA, 495 bp, Artificial Sequence
  source: /note="Description of Artificial Sequence: Synthetic polynucleotide"
gcctccctcgcgccatcagcgttacttagaatcagctggattccagcccctttttgcaagttcccagctgtccagccttgacttactcacctacaacagtgagccaacttccctctccaaaatatatggtgtttcgtcgaccgttacttagaatcagtcactgctggcacagaagtacacagctgagtccctgggttctgagggctggatcttcagagtggagaatgatgcattaggcatcttagctgagaatcgatcctcgggcatccctgaatcatctatcggaacgttgttgttaaagtaaatgagcaactccagtccccgcatcatggtctgtctgtaccagaaaaggtagtcgtgtcctgaaattggtttacatctcagagtcacttcttgtcccatctctgtcacctcgtgccggggtgactggataactccagcatctgtgtgctctatgaagcgttacttagaatcagctgagcgggctggcaaggc

SEQ ID NO: 589 - DNA, 495 bp, Artificial Sequence
  source: /note="Description of Artificial Sequence: Synthetic polynucleotide"
gcctccctcgcgccatcagtaggagacagaatcagctcctggaactccgaccttatgatacactatcccgaaagaagtcttttacatacccaagacagagagctgggttccactgccaaaaaacagtttttcattgtcgactaggagacagaatcagtcactgctggcacagaagtacacagctgagtccctgggttctgagggctggatcttcagagtggagaatgatgcattaggcatcttagctgagaatcgatcctcgggcatccctgaatcatctatcggaacgttgttgttaaagtaaatgagcaactccagtccccgcatcatggtctgtctgtaccagaaaaggtagtcgtgtcctgaaattggtttacatctcagagtcacttcttgtcccatctctgtcacctcgtgccggggtgactggataactccagcatctgtgtgctctatgaagtaggagacagaatcagctgagcgggctggcaaggc

SEQ ID NO: 590 - DNA, 495 bp, Artificial Sequence
  source: /note="Description of Artificial Sequence: Synthetic polynucleotide"
gcctccctcgcgccatcaggacactctagaatcagagagaactctgccttcaagggacaatggccataccaccctgattctgcaacttacctaggatggagagtcgagtcccatcaccaaaatgctggggctgatgtcgacgacactctagaatcagtcactgctggcacagaagtacacagctgagtccctgggttctgagggctggatcttcagagtggagaatgatgcattaggcatcttagctgagaatcgatcctcgggcatccctgaatcatctatcggaacgttgttgttaaagtaaatgagcaactccagtccccgcatcatggtctgtctgtaccagaaaaggtagtcgtgtcctgaaattggtttacatctcagagtcacttcttgtcccatctctgtcacctcgtgccggggtgactggataactccagcatctgtgtgctctatgaaggacactctagaatcagctgagcgggctggcaaggc

SEQ ID NO: 591 - DNA, 495 bp, Artificial Sequence
  source: /note="Description of Artificial Sequence: Synthetic polynucleotide"
gcctccctcgcgccatcagttcggaacagaatcagatcattgcagtcaaacccaggcacccccgagtcaagagtggagcccccatacctgtcacagtgagcctggtcccgttcccaaagtggaggggtgaattatgtcgacttcggaacagaatcagtcactgctggcacagaagtacacagctgagtccctgggttctgagggctggatcttcagagtggagaatgatgcattaggcatcttagctgagaatcgatcctcgggcatccctgaatcatctatcggaacgttgttgttaaagtaaatgagcaactccagtccccgcatcatggtctgtctgtaccagaaaaggtagtcgtgtcctgaaattggtttacatctcagagtcacttcttgtcccatctctgtcacctcgtgccggggtgactggataactccagcatctgtgtgctctatgaagttcggaacagaatcagctgagcgggctggcaaggc

SEQ ID NO: 592 - DNA, 495 bp, Artificial Sequence
  source: /note="Description of Artificial Sequence: Synthetic polynucleotide"
gcctccctcgcgccatcagaagtaacgagaatcaggggtcgtgcaggctgggctgctcaccctctctcccacctggagcccccttcttacctagcacggtgagccgtgtccctggcccgaagaactgctcattgtgtcgacaagtaacgagaatcagtcactgctggcacagaagtacacagctgagtccctgggttctgagggctggatcttcagagtggagaatgatgcattaggcatcttagctgagaatcgatcctcgggcatccctgaatcatctatcggaacgttgttgttaaagtaaatgagcaactccagtccccgcatcatggtctgtctgtaccagaaaaggtagtcgtgtcctgaaattggtttacatctcagagtcacttcttgtcccatctctgtcacctcgtgccggggtgactggataactccagcatctgtgtgctctatgaagaagtaacgagaatcagctgagcgggctggcaaggc

SEQ ID NO: 593 - DNA, 495 bp, Artificial Sequence
  source: /note="Description of Artificial Sequence: Synthetic polynucleotide"
gcctccctcgcgccatcaggtctcctaagaatcagcctctgcccatcccgccctctcggagctctccggagccccaaccgcctccttacccagtacggtcagcctagagccttctccaaaaaacagctccccggtgtcgacgtctcctaagaatcagtcactgctggcacagaagtacacagctgagtccctgggttctgagggctggatcttcagagtggagaatgatgcattaggcatcttagctgagaatcgatcctcgggcatccctgaatcatctatcggaacgttgttgttaaagtaaatgagcaactccagtccccgcatcatggtctgtctgtaccagaaaaggtagtcgtgtcctgaaattggtttacatctcagagtcacttcttgtcccatctctgtcacctcgtgccggggtgactggataactccagcatctgtgtgctctatgaaggtctcctaagaatcagctgagcgggctggcaaggc

SEQ ID NO: 594 - DNA, 495 bp, Artificial Sequence
  source: /note="Description of Artificial Sequence: Synthetic polynucleotide"
gcctccctcgcgccatcaggtagacacagaatcaggcgtcccggggcgccccctccccagttccggggcttcagcgggagcccccgcttaccgagcactgtcagccgggtgcctgggccaaaatactgcgtatctgtcgacgtagacacagaatcagtcactgctggcacagaagtacacagctgagtccctgggttctgagggctggatcttcagagtggagaatgatgcattaggcatcttagctgagaatcgatcctcgggcatccctgaatcatctatcggaacgttgttgttaaagtaaatgagcaactccagtccccgcatcatggtctgtctgtaccagaaaaggtagtcgtgtcctgaaattggtttacatctcagagtcacttcttgtcccatctctgtcacctcgtgccggggtgactggataactccagcatctgtgtgctctatgaaggtagacacagaatcagctgagcgggctggcaaggc

SEQ ID NO: 595 - DNA, 495 bp, Artificial Sequence
  source: /note="Description of Artificial Sequence: Synthetic polynucleotide"
gcctccctcgcgccatcagcactgtacagaatcagcgcacaaaaacccgagcgcagtctcgtccccggtcccccggcggccccagcttacccagcactgagagccgggtcccggcgccgaagtactgaatgttttgtcgaccactgtacagaatcagtcactgctggcacagaagtacacagctgagtccctgggttctgagggctggatcttcagagtggagaatgatgcattaggcatcttagctgagaatcgatcctcgggcatccctgaatcatctatcggaacgttgttgttaaagtaaatgagcaactccagtccccgcatcatggtctgtctgtaccagaaaaggtagtcgtgtcctgaaattggtttacatctcagagtcacttcttgtcccatctctgtcacctcgtgccggggtgactggataactccagcatctgtgtgctctatgaagcactgtacagaatcagctgagcgggctggcaaggc

SEQ ID NO: 596 - DNA, 495 bp, Artificial Sequence
  source: /note="Description of Artificial Sequence: Synthetic polynucleotide"
gcctccctcgcgccatcaggatgatccagaatcagccccgcaaaaaccagacccaagccgcccgcgcccgcgccccagcagcccgcgctcaccgagcaccaggagccgcgtgcctggcccgaagtactgggtctcgtcgacgatgatccagaatcagtcactgctggcacagaagtacacagctgagtccctgggttctgagggctggatcttcagagtggagaatgatgcattaggcatcttagctgagaatcgatcctcgggcatccctgaatcatctatcggaacgttgttgttaaagtaaatgagcaactccagtccccgcatcatggtctgtctgtaccagaaaaggtagtcgtgtcctgaaattggtttacatctcagagtcacttcttgtcccatctctgtcacctcgtgccggggtgactggataactccagcatctgtgtgctctatgaaggatgatccagaatcagctgagcgggctggcaaggc

SEQ ID NO: 597 - DNA, 495 bp, Artificial Sequence
  source: /note="Description of Artificial Sequence: Synthetic polynucleotide"
gcctccctcgcgccatcagcgccaataagaatcagccgccgccttccacctgaatcccgccgcccgggtggtcccgcgaaaactcacccagcacggtcagcctgctgccggccccgaaagtcaggacgttggcccgtcgaccgccaataagaatcagtcactgctggcacagaagtacacagctgagtccctgggttctgagggctggatcttcagagtggagaatgatgcattaggcatcttagctgagaatcgatcctcgggcatccctgaatcatctatcggaacgttgttgttaaagtaaatgagcaactccagtccccgcatcatggtctgtctgtaccagaaaaggtagtcgtgtcctgaaattggtttacatctcagagtcacttcttgtcccatctctgtcacctcgtgccggggtgactggataactccagcatctgtgtgctctatgaagcgccaataagaatcagctgagcgggctggcaaggc

SEQ ID NO: 598 - DNA, 495 bp, Artificial Sequence
  source: /note="Description of Artificial Sequence: Synthetic polynucleotide"
gcctccctcgcgccatcagtcaagcctagaatcagccaccctccgactccggggaccgaggggctggaaggtggggagacgcccgaatctcacctgtgaccgtgagcctggtgcccggcccgaagtactgctcgtgtcgactcaagcctagaatcagtcactgctggcacagaagtacacagctgagtccctgggttctgagggctggatcttcagagtggagaatgatgcattaggcatcttagctgagaatcgatcctcgggcatccctgaatcatctatcggaacgttgttgttaaagtaaatgagcaactccagtccccgcatcatggtctgtctgtaccagaaaaggtagtcgtgtcctgaaattggtttacatctcagagtcacttcttgtcccatctctgtcacctcgtgccggggtgactggataactccagcatctgtgtgctctatgaagtcaagcctagaatcagctgagcgggctggcaaggc

SEQ ID NO: 599 - DNA, 495 bp, Artificial Sequence
  source: /note="Description of Artificial Sequence: Synthetic polynucleotide"
gcctccctcgcgccatcagagagtgtcagttgaccctgtggacccacttttccctgtgacggatctgcaaaagaacctgaaaaatgtcttacctacaactgtgagtctggtgccttgtccaaagaaagcttcagtgtcgacagagtgtcagttgacctcaccactagcacaaaaatacacagctgagtccctgggttctgagggctggatcttcagagtggctaaagttgcatcaggcatctctgctgagaatcgatccttcggcatccccgaatcatctagaggagcccggttgcggaagtaagccagcaactccagtccttgcatcatggtctgtctgtaccagaaaacagtattgtggcctaaaattggctgacatctcattgttacttcttgtcccatctctgtcaccttgtgccttggtgtctgggtgactctagcatctataagctctgtgaaaagagtgtcagttgaccctgagcgggctggcaaggc

SEQ ID NO: 600 - DNA, 495 bp, Artificial Sequence
  source: /note="Description of Artificial Sequence: Synthetic polynucleotide"
gcctccctcgcgccatcaggttccgaaagttgaccatttcccaggacagagtcctccctcatcgcacccctcctagagacccccagccttacctacaacggttaacctggtccccgaaccgaaggtgtagccatagtcgacgttccgaaagttgacctcaccactagcacaaaaatacacagctgagtccctgggttctgagggctggatcttcagagtggctaaagttgcatcaggcatctctgctgagaatcgatccttcggcatccccgaatcatctagaggagcccggttgcggaagtaagccagcaactccagtccttgcatcatggtctgtctgtaccagaaaacagtattgtggcctaaaattggctgacatctcattgttacttcttgtcccatctctgtcaccttgtgccttggtgtctgggtgactctagcatctataagctctgtgaaagttccgaaagttgaccctgagcgggctggcaaggc

SEQ ID NO: 601 - DNA, 495 bp, Artificial Sequence
  source: /note="Description of Artificial Sequence: Synthetic polynucleotide"
gcctccctcgcgccatcagcgttacttagttgaccctggattccagcccctttttgcaagttcccagctgtccagccttgacttactcacctacaacagtgagccaacttccctctccaaaatatatggtgtttcgtcgaccgttacttagttgacctcaccactagcacaaaaatacacagctgagtccctgggttctgagggctggatcttcagagtggctaaagttgcatcaggcatctctgctgagaatcgatccttcggcatccccgaatcatctagaggagcccggttgcggaagtaagccagcaactccagtccttgcatcatggtctgtctgtaccagaaaacagtattgtggcctaaaattggctgacatctcattgttacttcttgtcccatctctgtcaccttgtgccttggtgtctgggtgactctagcatctataagctctgtgaaacgttacttagttgaccctgagcgggctggcaaggc

SEQ ID NO: 602 - DNA, 495 bp, Artificial Sequence
  source: /note="Description of Artificial Sequence: Synthetic polynucleotide"
gcctccctcgcgccatcagtaggagacagttgaccctcctggaactccgaccttatgatacactatcccgaaagaagtcttttacatacccaagacagagagctgggttccactgccaaaaaacagtttttcattgtcgactaggagacagttgacctcaccactagcacaaaaatacacagctgagtccctgggttctgagggctggatcttcagagtggctaaagttgcatcaggcatctctgctgagaatcgatccttcggcatccccgaatcatctagaggagcccggttgcggaagtaagccagcaactccagtccttgcatcatggtctgtctgtaccagaaaacagtattgtggcctaaaattggctgacatctcattgttacttcttgtcccatctctgtcaccttgtgccttggtgtctgggtgactctagcatctataagctctgtgaaataggagacagttgaccctgagcgggctggcaaggc

SEQ ID NO: 603 - DNA, 495 bp, Artificial Sequence
  source: /note="Description of Artificial Sequence: Synthetic polynucleotide"
gcctccctcgcgccatcaggacactctagttgaccagagaactctgccttcaagggacaatggccataccaccctgattctgcaacttacctaggatggagagtcgagtcccatcaccaaaatgctggggctgatgtcgacgacactctagttgacctcaccactagcacaaaaatacacagctgagtccctgggttctgagggctggatcttcagagtggctaaagttgcatcaggcatctctgctgagaatcgatccttcggcatccccgaatcatctagaggagcccggttgcggaagtaagccagcaactccagtccttgcatcatggtctgtctgtaccagaaaacagtattgtggcctaaaattggctgacatctcattgttacttcttgtcccatctctgtcaccttgtgccttggtgtctgggtgactctagcatctataagctctgtgaaagacactctagttgaccctgagcgggctggcaaggc

SEQ ID NO: 604 - DNA, 495 bp, Artificial Sequence
  source: /note="Description of Artificial Sequence: Synthetic polynucleotide"
gcctccctcgcgccatcagttcggaacagttgaccatcattgcagtcaaacccaggcacccccgagtcaagagtggagcccccatacctgtcacagtgagcctggtcccgttcccaaagtggaggggtgaattatgtcgacttcggaacagttgacctcaccactagcacaaaaatacacagctgagtccctgggttctgagggctggatcttcagagtggctaaagttgcatcaggcatctctgctgagaatcgatccttcggcatccccgaatcatctagaggagcccggttgcggaagtaagccagcaactccagtccttgcatcatggtctgtctgtaccagaaaacagtattgtggcctaaaattggctgacatctcattgttacttcttgtcccatctctgtcaccttgtgccttggtgtctgggtgactctagcatctataagctctgtgaaattcggaacagttgaccctgagcgggctggcaaggc

SEQ ID NO: 605 - DNA, 495 bp, Artificial Sequence
  source: /note="Description of Artificial Sequence: Synthetic polynucleotide"
gcctccctcgcgccatcagaagtaacgagttgaccgggtcgtgcaggctgggctgctcaccctctctcccacctggagcccccttcttacctagcacggtgagccgtgtccctggcccgaagaactgctcattgtgtcgacaagtaacgagttgacctcaccactagcacaaaaatacacagctgagtccctgggttctgagggctggatcttcagagtggctaaagttgcatcaggcatctctgctgagaatcgatccttcggcatccccgaatcatctagaggagcccggttgcggaagtaagccagcaactccagtccttgcatcatggtctgtctgtaccagaaaacagtattgtggcctaaaattggctgacatctcattgttacttcttgtcccatctctgtcaccttgtgccttggtgtctgggtgactctagcatctataagctctgtgaaaaagtaacgagttgaccctgagcgggctggcaaggc

SEQ ID NO: 606 - DNA, 495 bp, Artificial Sequence
  source: /note="Description of Artificial Sequence: Synthetic polynucleotide"
gcctccctcgcgccatcaggtctcctaagttgacccctctgcccatcccgccctctcggagctctccggagccccaaccgcctccttacccagtacggtcagcctagagccttctccaaaaaacagctccccggtgtcgacgtctcctaagttgacctcaccactagcacaaaaatacacagctgagtccctgggttctgagggctggatcttcagagtggctaaagttgcatcaggcatctctgctgagaatcgatccttcggcatccccgaatcatctagaggagcccggttgcggaagtaagccagcaactccagtccttgcatcatggtctgtctgtaccagaaaacagtattgtggcctaaaattggctgacatctcattgttacttcttgtcccatctctgtcaccttgtgccttggtgtctgggtgactctagcatctataagctctgtgaaagtctcctaagttgaccctgagcgggctggcaaggc

SEQ ID NO: 607 - DNA, 495 bp, Artificial Sequence
  source: /note="Description of Artificial Sequence: Synthetic polynucleotide"
gcctccctcgcgccatcaggtagacacagttgaccgcgtcccggggcgccccctccccagttccggggcttcagcgggagcccccgcttaccgagcactgtcagccgggtgcctgggccaaaatactgcgtatctgtcgacgtagacacagttgacctcaccactagcacaaaaatacacagctgagtccctgggttctgagggctggatcttcagagtggctaaagttgcatcaggcatctctgctgagaatcgatccttcggcatccccgaatcatctagaggagcccggttgcggaagtaagccagcaactccagtccttgcatcatggtctgtctgtaccagaaaacagtattgtggcctaaaattggctgacatctcattgttacttcttgtcccatctctgtcaccttgtgccttggtgtctgggtgactctagcatctataagctctgtgaaagtagacacagttgaccctgagcgggctggcaaggc

SEQ ID NO: 608 - DNA, 495 bp, Artificial Sequence
  source: /note="Description of Artificial Sequence: Synthetic polynucleotide"
gcctccctcgcgccatcagcactgtacagttgacccgcacaaaaacccgagcgcagtctcgtccccggtcccccggcggccccagcttacccagcactgagagccgggtcccggcgccgaagtactgaatgttttgtcgaccactgtacagttgacctcaccactagcacaaaaatacacagctgagtccctgggttctgagggctggatcttcagagtggctaaagttgcatcaggcatctctgctgagaatcgatccttcggcatccccgaatcatctagaggagcccggttgcggaagtaagccagcaactccagtccttgcatcatggtctgtctgtaccagaaaacagtattgtggcctaaaattggctgacatctcattgttacttcttgtcccatctctgtcaccttgtgccttggtgtctgggtgactctagcatctataagctctgtgaaacactgtacagttgaccctgagcgggctggcaaggc

SEQ ID NO: 609 - DNA, 495 bp, Artificial Sequence
  source: /note="Description of Artificial Sequence: Synthetic polynucleotide"
gcctccctcgcgccatcaggatgatccagttgaccccccgcaaaaaccagacccaagccgcccgcgcccgcgccccagcagcccgcgctcaccgagcaccaggagccgcgtgcctggcccgaagtactgggtctcgtcgacgatgatccagttgacctcaccactagcacaaaaatacacagctgagtccctgggttctgagggctggatcttcagagtggctaaagttgcatcaggcatctctgctgagaatcgatccttcggcatccccgaatcatctagaggagcccggttgcggaagtaagccagcaactccagtccttgcatcatggtctgtctgtaccagaaaacagtattgtggcctaaaattggctgacatctcattgttacttcttgtcccatctctgtcaccttgtgccttggtgtctgggtgactctagcatctataagctctgtgaaagatgatccagttgaccctgagcgggctggcaaggc

SEQ ID NO: 610 - DNA, 495 bp, Artificial Sequence
  source: /note="Description of Artificial Sequence: Synthetic polynucleotide"
gcctccctcgcgccatcagcgccaataagttgaccccgccgccttccacctgaatcccgccgcccgggtggtcccgcgaaaactcacccagcacggtcagcctgctgccggccccgaaagtcaggacgttggcccgtcgaccgccaataagttgacctcaccactagcacaaaaatacacagctgagtccctgggttctgagggctggatcttcagagtggctaaagttgcatcaggcatctctgctgagaatcgatccttcggcatccccgaatcatctagaggagcccggttgcggaagtaagccagcaactccagtccttgcatcatggtctgtctgtaccagaaaacagtattgtggcctaaaattggctgacatctcattgttacttcttgtcccatctctgtcaccttgtgccttggtgtctgggtgactctagcatctataagctctgtgaaacgccaataagttgaccctgagcgggctggcaaggc

SEQ ID NO: 611 - DNA, 495 bp, Artificial Sequence
  source: /note="Description of Artificial Sequence: Synthetic polynucleotide"
gcctccctcgcgccatcagtcaagcctagttgaccccaccctccgactccggggaccgaggggctggaaggtggggagacgcccgaatctcacctgtgaccgtgagcctggtgcccggcccgaagtactgctcgtgtcgactcaagcctagttgacctcaccactagcacaaaaatacacagctgagtccctgggttctgagggctggatcttcagagtggctaaagttgcatcaggcatctctgctgagaatcgatccttcggcatccccgaatcatctagaggagcccggttgcggaagtaagccagcaactccagtccttgcatcatggtctgtctgtaccagaaaacagtattgtggcctaaaattggctgacatctcattgttacttcttgtcccatctctgtcaccttgtgccttggtgtctgggtgactctagcatctataagctctgtgaaatcaagcctagttgaccctgagcgggctggcaaggc

SEQ ID NO: 612 - DNA, 495 bp, Artificial Sequence
  source: /note="Description of Artificial Sequence: Synthetic polynucleotide"
gcctccctcgcgccatcagagagtgtcagttatgcctgtggacccacttttccctgtgacggatctgcaaaagaacctgaaaaatgtcttacctacaactgtgagtctggtgccttgtccaaagaaagcttcagtgtcgacagagtgtcagttatgctcactgctggcacagaagtacagggctgagtcccccagctccaaggagctcatgttcagttcagaatgatagtcactgaactgttgagctgagaatcgatcagggatgcttcctttatcgctctgcatcttttcataaaacgaaatgaggaactgggggtcctgacctggaccctgctggtaccagtagacagtgtcgtgtctagggataggatagcatttcagagtggctgtttccctcttttctttgatcagatgtcttggggactggatgactccagcagccactgaaactgtggaggaaagagtgtcagttatgcctgagcgggctggcaaggc

SEQ ID NO: 613 - DNA, 495 bp, Artificial Sequence
  source: /note="Description of Artificial Sequence: Synthetic polynucleotide"
gcctccctcgcgccatcaggttccgaaagttatgcatttcccaggacagagtcctccctcatcgcacccctcctagagacccccagccttacctacaacggttaacctggtccccgaaccgaaggtgtagccatagtcgacgttccgaaagttatgctcactgctggcacagaagtacagggctgagtcccccagctccaaggagctcatgttcagttcagaatgatagtcactgaactgttgagctgagaatcgatcagggatgcttcctttatcgctctgcatcttttcataaaacgaaatgaggaactgggggtcctgacctggaccctgctggtaccagtagacagtgtcgtgtctagggataggatagcatttcagagtggctgtttccctcttttctttgatcagatgtcttggggactggatgactccagcagccactgaaactgtggaggaagttccgaaagttatgcctgagcgggctggcaaggc

SEQ ID NO: 614 - DNA, 495 bp, Artificial Sequence
  source: /note="Description of Artificial Sequence: Synthetic polynucleotide"
gcctccctcgcgccatcagcgttacttagttatgcctggattccagcccctttttgcaagttcccagctgtccagccttgacttactcacctacaacagtgagccaacttccctctccaaaatatatggtgtttcgtcgaccgttacttagttatgctcactgctggcacagaagtacagggctgagtcccccagctccaaggagctcatgttcagttcagaatgatagtcactgaactgttgagctgagaatcgatcagggatgcttcctttatcgctctgcatcttttcataaaacgaaatgaggaactgggggtcctgacctggaccctgctggtaccagtagacagtgtcgtgtctagggataggatagcatttcagagtggctgtttccctcttttctttgatcagatgtcttggggactggatgactccagcagccactgaaactgtggaggaacgttacttagttatgcctgagcgggctggcaaggc

SEQ ID NO: 615 - DNA, 495 bp, Artificial Sequence
  source: /note="Description of Artificial Sequence: Synthetic polynucleotide"
gcctccctcgcgccatcagtaggagacagttatgcctcctggaactccgaccttatgatacactatcccgaaagaagtcttttacatacccaagacagagagctgggttccactgccaaaaaacagtttttcattgtcgactaggagacagttatgctcactgctggcacagaagtacagggctgagtcccccagctccaaggagctcatgttcagttcagaatgatagtcactgaactgttgagctgagaatcgatcagggatgcttcctttatcgctctgcatcttttcataaaacgaaatgaggaactgggggtcctgacctggaccctgctggtaccagtagacagtgtcgtgtctagggataggatagcatttcagagtggctgtttccctcttttctttgatcagatgtcttggggactggatgactccagcagccactgaaactgtggaggaataggagacagttatgcctgagcgggctggcaaggc

SEQ ID NO: 616 - DNA, 495 bp, Artificial Sequence
  source: /note="Description of Artificial Sequence: Synthetic polynucleotide"
gcctccctcgcgccatcaggacactctagttatgcagagaactctgccttcaagggacaatggccataccaccctgattctgcaacttacctaggatggagagtcgagtcccatcaccaaaatgctggggctgatgtcgacgacactctagttatgctcactgctggcacagaagtacagggctgagtcccccagctccaaggagctcatgttcagttcagaatgatagtcactgaactgttgagctgagaatcgatcagggatgcttcctttatcgctctgcatcttttcataaaacgaaatgaggaactgggggtcctgacctggaccctgctggtaccagtagacagtgtcgtgtctagggataggatagcatttcagagtggctgtttccctcttttctttgatcagatgtcttggggactggatgactccagcagccactgaaactgtggaggaagacactctagttatgcctgagcgggctggcaaggc

SEQ ID NO: 617 - DNA, 495 bp, Artificial Sequence
  source: /note="Description of Artificial Sequence: Synthetic polynucleotide"
gcctccctcgcgccatcagttcggaacagttatgcatcattgcagtcaaacccaggcacccccgagtcaagagtggagcccccatacctgtcacagtgagcctggtcccgttcccaaagtggaggggtgaattatgtcgacttcggaacagttatgctcactgctggcacagaagtacagggctgagtcccccagctccaaggagctcatgttcagttcagaatgatagtcactgaactgttgagctgagaatcgatcagggatgcttcctttatcgctctgcatcttttcataaaacgaaatgaggaactgggggtcctgacctggaccctgctggtaccagtagacagtgtcgtgtctagggataggatagcatttcagagtggctgtttccctcttttctttgatcagatgtcttggggactggatgactccagcagccactgaaactgtggaggaattcggaacagttatgcctgagcgggctggcaaggc

SEQ ID NO: 618 - DNA, 495 bp, Artificial Sequence
  source: /note="Description of Artificial Sequence: Synthetic polynucleotide"
gcctccctcgcgccatcagaagtaacgagttatgcgggtcgtgcaggctgggctgctcaccctctctcccacctggagcccccttcttacctagcacggtgagccgtgtccctggcccgaagaactgctcattgtgtcgacaagtaacgagttatgctcactgctggcacagaagtacagggctgagtcccccagctccaaggagctcatgttcagttcagaatgatagtcactgaactgttgagctgagaatcgatcagggatgcttcctttatcgctctgcatcttttcataaaacgaaatgaggaactgggggtcctgacctggaccctgctggtaccagtagacagtgtcgtgtctagggataggatagcatttcagagtggctgtttccctcttttctttgatcagatgtcttggggactggatgactccagcagccactgaaactgtggaggaaaagtaacgagttatgcctgagcgggctggcaaggc

SEQ ID NO: 619 - DNA, 495 bp, Artificial Sequence
  source: /note="Description of Artificial Sequence: Synthetic polynucleotide"
gcctccctcgcgccatcaggtctcctaagttatgccctctgcccatcccgccctctcggagctctccggagccccaaccgcctccttacccagtacggtcagcctagagccttctccaaaaaacagctccccggtgtcgacgtctcctaagttatgctcactgctggcacagaagtacagggctgagtcccccagctccaaggagctcatgttcagttcagaatgatagtcactgaactgttgagctgagaatcgatcagggatgcttcctttatcgctctgcatcttttcataaaacgaaatgaggaactgggggtcctgacctggaccctgctggtaccagtagacagtgtcgtgtctagggataggatagcatttcagagtggctgtttccctcttttctttgatcagatgtcttggggactggatgactccagcagccactgaaactgtggaggaagtctcctaagttatgcctgagcgggctggcaaggc

SEQ ID NO: 620 - DNA, 495 bp, Artificial Sequence
  source: /note="Description of Artificial Sequence: Synthetic polynucleotide"
gcctccctcgcgccatcaggtagacacagttatgcgcgtcccggggcgccccctccccagttccggggcttcagcgggagcccccgcttaccgagcactgtcagccgggtgcctgggccaaaatactgcgtatctgtcgacgtagacacagttatgctcactgctggcacagaagtacagggctgagtcccccagctccaaggagctcatgttcagttcagaatgatagtcactgaactgttgagctgagaatcgatcagggatgcttcctttatcgctctgcatcttttcataaaacgaaatgaggaactgggggtcctgacctggaccctgctggtaccagtagacagtgtcgtgtctagggataggatagcatttcagagtggctgtttccctcttttctttgatcagatgtcttggggactggatgactccagcagccactgaaactgtggaggaagtagacacagttatgcctgagcgggctggcaaggc

SEQ ID NO: 621 - DNA, 495 bp, Artificial Sequence
  source: /note="Description of Artificial Sequence: Synthetic polynucleotide"
gcctccctcgcgccatcagcactgtacagttatgccgcacaaaaacccgagcgcagtctcgtccccggtcccccggcggccccagcttacccagcactgagagccgggtcccggcgccgaagtactgaatgttttgtcgaccactgtacagttatgctcactgctggcacagaagtacagggctgagtcccccagctccaaggagctcatgttcagttcagaatgatagtcactgaactgttgagctgagaatcgatcagggatgcttcctttatcgctctgcatcttttcataaaacgaaatgaggaactgggggtcctgacctggaccctgctggtaccagtagacagtgtcgtgtctagggataggatagcatttcagagtggctgtttccctcttttctttgatcagatgtcttggggactggatgactccagcagccactgaaactgtggaggaacactgtacagttatgcctgagcgggctggcaaggc

SEQ ID NO: 622 - DNA, 495 bp, Artificial Sequence
  source: /note="Description of Artificial Sequence: Synthetic polynucleotide"
gcctccctcgcgccatcaggatgatccagttatgcccccgcaaaaaccagacccaagccgcccgcgcccgcgccccagcagcccgcgctcaccgagcaccaggagccgcgtgcctggcccgaagtactgggtctcgtcgacgatgatccagttatgctcactgctggcacagaagtacagggctgagtcccccagctccaaggagctcatgttcagttcagaatgatagtcactgaactgttgagctgagaatcgatcagggatgcttcctttatcgctctgcatcttttcataaaacgaaatgaggaactgggggtcctgacctggaccctgctggtaccagtagacagtgtcgtgtctagggataggatagcatttcagagtggctgtttccctcttttctttgatcagatgtcttggggactggatgactccagcagccactgaaactgtggaggaagatgatccagttatgcctgagcgggctggcaaggc

SEQ ID NO: 623 - DNA, 495 bp, Artificial Sequence
  source: /note="Description of Artificial Sequence: Synthetic polynucleotide"
gcctccctcgcgccatcagcgccaataagttatgcccgccgccttccacctgaatcccgccgcccgggtggtcccgcgaaaactcacccagcacggtcagcctgctgccggccccgaaagtcaggacgttggcccgtcgaccgccaataagttatgctcactgctggcacagaagtacagggctgagtcccccagctccaaggagctcatgttcagttcagaatgatagtcactgaactgttgagctgagaatcgatcagggatgcttcctttatcgctctgcatcttttcataaaacgaaatgaggaactgggggtcctgacctggaccctgctggtaccagtagacagtgtcgtgtctagggataggatagcatttcagagtggctgtttccctcttttctttgatcagatgtcttggggactggatgactccagcagccactgaaactgtggaggaacgccaataagttatgcctgagcgggctggcaaggc

SEQ ID NO: 624 - DNA, 495 bp, Artificial Sequence
  source: /note="Description of Artificial Sequence: Synthetic polynucleotide"
gcctccctcgcgccatcagtcaagcctagttatgcccaccctccgactccggggaccgaggggctggaaggtggggagacgcccgaatctcacctgtgaccgtgagcctggtgcccggcccgaagtactgctcgtgtcgactcaagcctagttatgctcactgctggcacagaagtacagggctgagtcccccagctccaaggagctcatgttcagttcagaatgatagtcactgaactgttgagctgagaatcgatcagggatgcttcctttatcgctctgcatcttttcataaaacgaaatgaggaactgggggtcctgacctggaccctgctggtaccagtagacagtgtcgtgtctagggataggatagcatttcagagtggctgtttccctcttttctttgatcagatgtcttggggactggatgactccagcagccactgaaactgtggaggaatcaagcctagttatgcctgagcgggctggcaaggc

SEQ ID NO: 625 - DNA, 495 bp, Artificial Sequence
  source: /note="Description of Artificial Sequence: Synthetic polynucleotide"
gcctccctcgcgccatcagagagtgtccagcatatctgtggacccacttttccctgtgacggatctgcaaaagaacctgaaaaatgtcttacctacaactgtgagtctggtgccttgtccaaagaaagcttcagtgtcgacagagtgtccagcatattcactgctggcacagaaataaactccagaatcctccagttctgcaggctgcaccttcagagtagaatacgtccctccagtcctttcagctaagaatcgattgttgggcataccggactcatcctgtttagactctttcacaaaatgtaacagaaattttatttcttttcccataacacgtcgataccaataaagattatcatgtccagaaattgggtcacatctcagagtcacagtctggcccttctctattacgctgtggctggggaactgagtaactccagcttctatgtgctctgtgggaagagtgtccagcatatctgagcgggctggcaaggc

SEQ ID NO: 626 - DNA, 495 bp, Artificial Sequence
  source: /note="Description of Artificial Sequence: Synthetic polynucleotide"
gcctccctcgcgccatcaggttccgaacagcatatatttcccaggacagagtcctccctcatcgcacccctcctagagacccccagccttacctacaacggttaacctggtccccgaaccgaaggtgtagccatagtcgacgttccgaacagcatattcactgctggcacagaaataaactccagaatcctccagttctgcaggctgcaccttcagagtagaatacgtccctccagtcctttcagctaagaatcgattgttgggcataccggactcatcctgtttagactctttcacaaaatgtaacagaaattttatttcttttcccataacacgtcgataccaataaagattatcatgtccagaaattgggtcacatctcagagtcacagtctggcccttctctattacgctgtggctggggaactgagtaactccagcttctatgtgctctgtgggagttccgaacagcatatctgagcgggctggcaaggc

SEQ ID NO: 627 - DNA, 495 bp, Artificial Sequence
  source: /note="Description of Artificial Sequence: Synthetic polynucleotide"
gcctccctcgcgccatcagcgttacttcagcatatctggattccagcccctttttgcaagttcccagctgtccagccttgacttactcacctacaacagtgagccaacttccctctccaaaatatatggtgtttcgtcgaccgttacttcagcatattcactgctggcacagaaataaactccagaatcctccagttctgcaggctgcaccttcagagtagaatacgtccctccagtcctttcagctaagaatcgattgttgggcataccggactcatcctgtttagactctttcacaaaatgtaacagaaattttatttcttttcccataacacgtcgataccaataaagattatcatgtccagaaattgggtcacatctcagagtcacagtctggcccttctctattacgctgtggctggggaactgagtaactccagcttctatgtgctctgtgggacgttacttcagcatatctgagcgggctggcaaggc

SEQ ID NO: 628 - DNA, 495 bp, Artificial Sequence
  source: /note="Description of Artificial Sequence: Synthetic polynucleotide"
gcctccctcgcgccatcagtaggagaccagcatatctcctggaactccgaccttatgatacactatcccgaaagaagtcttttacatacccaagacagagagctgggttccactgccaaaaaacagtttttcattgtcgactaggagaccagcatattcactgctggcacagaaataaactccagaatcctccagttctgcaggctgcaccttcagagtagaatacgtccctccagtcctttcagctaagaatcgattgttgggcataccggactcatcctgtttagactctttcacaaaatgtaacagaaattttatttcttttcccataacacgtcgataccaataaagattatcatgtccagaaattgggtcacatctcagagtcacagtctggcccttctctattacgctgtggctggggaactgagtaactccagcttctatgtgctctgtgggataggagaccagcatatctgagcgggctggcaaggc

SEQ ID NO: 629 - DNA, 495 bp, Artificial Sequence
  source: /note="Description of Artificial Sequence: Synthetic polynucleotide"
gcctccctcgcgccatcaggacactctcagcatatagagaactctgccttcaagggacaatggccataccaccctgattctgcaacttacctaggatggagagtcgagtcccatcaccaaaatgctggggctgatgtcgacgacactctcagcatattcactgctggcacagaaataaactccagaatcctccagttctgcaggctgcaccttcagagtagaatacgtccctccagtcctttcagctaagaatcgattgttgggcataccggactcatcctgtttagactctttcacaaaatgtaacagaaattttatttcttttcccataacacgtcgataccaataaagattatcatgtccagaaattgggtcacatctcagagtcacagtctggcccttctctattacgctgtggctggggaactgagtaactccagcttctatgtgctctgtgggagacactctcagcatatctgagcgggctggcaaggc

SEQ ID NO: 630 - DNA, 495 bp, Artificial Sequence
  source: /note="Description of Artificial Sequence: Synthetic polynucleotide"
gcctccctcgcgccatcagttcggaaccagcatatatcattgcagtcaaacccaggcacccccgagtcaagagtggagcccccatacctgtcacagtgagcctggtcccgttcccaaagtggaggggtgaattatgtcgacttcggaaccagcatattcactgctggcacagaaataaactccagaatcctccagttctgcaggctgcaccttcagagtagaatacgtccctccagtcctttcagctaagaatcgattgttgggcataccggactcatcctgtttagactctttcacaaaatgtaacagaaattttatttcttttcccataacacgtcgataccaataaagattatcatgtccagaaattgggtcacatctcagagtcacagtctggcccttctctattacgctgtggctggggaactgagtaactccagcttctatgtgctctgtgggattcggaaccagcatatctgagcgggctggcaaggc

SEQ ID NO: 631 - DNA, 495 bp, Artificial Sequence
  source: /note="Description of Artificial Sequence: Synthetic polynucleotide"
gcctccctcgcgccatcagaagtaacgcagcatatgggtcgtgcaggctgggctgctcaccctctctcccacctggagcccccttcttacctagcacggtgagccgtgtccctggcccgaagaactgctcattgtgtcgacaagtaacgcagcatattcactgctggcacagaaataaactccagaatcctccagttctgcaggctgcaccttcagagtagaatacgtccctccagtcctttcagctaagaatcgattgttgggcataccggactcatcctgtttagactctttcacaaaatgtaacagaaattttatttcttttcccataacacgtcgataccaataaagattatcatgtccagaaattgggtcacatctcagagtcacagtctggcccttctctattacgctgtggctggggaactgagtaactccagcttctatgtgctctgtgggaaagtaacgcagcatatctgagcgggctggcaaggc

SEQ ID NO: 632 - DNA, 495 bp, Artificial Sequence
  source: /note="Description of Artificial Sequence: Synthetic polynucleotide"
gcctccctcgcgccatcaggtctcctacagcatatcctctgcccatcccgccctctcggagctctccggagccccaaccgcctccttacccagtacggtcagcctagagccttctccaaaaaacagctccccggtgtcgacgtctcctacagcatattcactgctggcacagaaataaactccagaatcctccagttctgcaggctgcaccttcagagtagaatacgtccctccagtcctttcagctaagaatcgattgttgggcataccggactcatcctgtttagactctttcacaaaatgtaacagaaattttatttcttttcccataacacgtcgataccaataaagattatcatgtccagaaattgggtcacatctcagagtcacagtctggcccttctctattacgctgtggctggggaactgagtaactccagcttctatgtgctctgtgggagtctcctacagcatatctgagcgggctggcaaggc

SEQ ID NO: 633 - DNA, 495 bp, Artificial Sequence
  source: /note="Description of Artificial Sequence: Synthetic polynucleotide"
gcctccctcgcgccatcaggtagacaccagcatatgcgtcccggggcgccccctccccagttccggggcttcagcgggagcccccgcttaccgagcactgtcagccgggtgcctgggccaaaatactgcgtatctgtcgacgtagacaccagcatattcactgctggcacagaaataaactccagaatcctccagttctgcaggctgcaccttcagagtagaatacgtccctccagtcctttcagctaagaatcgattgttgggcataccggactcatcctgtttagactctttcacaaaatgtaacagaaattttatttcttttcccataacacgtcgataccaataaagattatcatgtccagaaattgggtcacatctcagagtcacagtctggcccttctctattacgctgtggctggggaactgagtaactccagcttctatgtgctctgtgggagtagacaccagcatatctgagcgggctggcaaggc

SEQ ID NO: 634 - DNA, 495 bp, Artificial Sequence
  source: /note="Description of Artificial Sequence: Synthetic polynucleotide"
gcctccctcgcgccatcagcactgtaccagcatatcgcacaaaaacccgagcgcagtctcgtccccggtcccccggcggccccagcttacccagcactgagagccgggtcccggcgccgaagtactgaatgttttgtcgaccactgtaccagcatattcactgctggcacagaaataaactccagaatcctccagttctgcaggctgcaccttcagagtagaatacgtccctccagtcctttcagctaagaatcgattgttgggcataccggactcatcctgtttagactctttcacaaaatgtaacagaaattttatttcttttcccataacacgtcgataccaataaagattatcatgtccagaaattgggtcacatctcagagtcacagtctggcccttctctattacgctgtggctggggaactgagtaactccagcttctatgtgctctgtgggacactgtaccagcatatctgagcgggctggcaaggc

SEQ ID NO: 635 - DNA, 495 bp, Artificial Sequence
  source: /note="Description of Artificial Sequence: Synthetic polynucleotide"
gcctccctcgcgccatcaggatgatcccagcatatccccgcaaaaaccagacccaagccgcccgcgcccgcgccccagcagcccgcgctcaccgagcaccaggagccgcgtgcctggcccgaagtactgggtctcgtcgacgatgatcccagcatattcactgctggcacagaaataaactccagaatcctccagttctgcaggctgcaccttcagagtagaatacgtccctccagtcctttcagctaagaatcgattgttgggcataccggactcatcctgtttagactctttcacaaaatgtaacagaaattttatttcttttcccataacacgtcgataccaataaagattatcatgtccagaaattgggtcacatctcagagtcacagtctggcccttctctattacgctgtggctggggaactgagtaactccagcttctatgtgctctgtgggagatgatcccagcatatctgagcgggctggcaaggc

SEQ ID NO: 636 - DNA, 495 bp, Artificial Sequence
  source: /note="Description of Artificial Sequence: Synthetic polynucleotide"
gcctccctcgcgccatcagcgccaatacagcatatccgccgccttccacctgaatcccgccgcccgggtggtcccgcgaaaactcacccagcacggtcagcctgctgccggccccgaaagtcaggacgttggcccgtcgaccgccaatacagcatattcactgctggcacagaaataaactccagaatcctccagttctgcaggctgcaccttcagagtagaatacgtccctccagtcctttcagctaagaatcgattgttgggcataccggactcatcctgtttagactctttcacaaaatgtaacagaaattttatttcttttcccataacacgtcgataccaataaagattatcatgtccagaaattgggtcacatctcagagtcacagtctggcccttctctattacgctgtggctggggaactgagtaactccagcttctatgtgctctgtgggacgccaatacagcatatctgagcgggctggcaaggc

SEQ ID NO: 637 - DNA, 495 bp, Artificial Sequence
  source: /note="Description of Artificial Sequence: Synthetic polynucleotide"
gcctccctcgcgccatcagtcaagcctcagcatatccaccctccgactccggggaccgaggggctggaaggtggggagacgcccgaatctcacctgtgaccgtgagcctggtgcccggcccgaagtactgctcgtgtcgactcaagcctcagcatattcactgctggcacagaaataaactccagaatcctccagttctgcaggctgcaccttcagagtagaatacgtccctccagtcctttcagctaagaatcgattgttgggcataccggactcatcctgtttagactctttcacaaaatgtaacagaaattttatttcttttcccataacacgtcgataccaataaagattatcatgtccagaaattgggtcacatctcagagtcacagtctggcccttctctattacgctgtggctggggaactgagtaactccagcttctatgtgctctgtgggatcaagcctcagcatatctgagcgggctggcaaggc

SEQ ID NO: 638 - DNA, 495 bp, Artificial Sequence
  source: /note="Description of Artificial Sequence: Synthetic polynucleotide"
gcctccctcgcgccatcagagagtgtcgcaggattctgtggacccacttttccctgtgacggatctgcaaaagaacctgaaaaatgtcttacctacaactgtgagtctggtgccttgtccaaagaaagcttcagtgtcgacagagtgtcgcaggatttcactggtggcacacaggtacatggctgtgtcccccaggcctggtgagcggatgtcaagaaagcagaaagaagtgttcggcctcctggattggaagttatcaggggtgtctgcttcattgttaaaatctttgtcatagtagtggaacagcagctttggggcctgacttgacttctgctggtaccagtacatgacgttatggttcaaagtctgagaacaactcagggtcactggctttccaaactgggtaacctggtatcttgggttctggatgaccatggcatccccatgacctgtagagaaaagagtgtcgcaggattctgagcgggctggcaaggc

SEQ ID NO: 639 - DNA, 495 bp, Artificial Sequence
  source: /note="Description of Artificial Sequence: Synthetic polynucleotide"
gcctccctcgcgccatcaggttccgaagcaggattatttcccaggacagagtcctccctcatcgcacccctcctagagacccccagccttacctacaacggttaacctggtccccgaaccgaaggtgtagccatagtcgacgttccgaagcaggatttcactggtggcacacaggtacatggctgtgtcccccaggcctggtgagcggatgtcaagaaagcagaaagaagtgttcggcctcctggattggaagttatcaggggtgtctgcttcattgttaaaatctttgtcatagtagtggaacagcagctttggggcctgacttgacttctgctggtaccagtacatgacgttatggttcaaagtctgagaacaactcagggtcactggctttccaaactgggtaacctggtatcttgggttctggatgaccatggcatccccatgacctgtagagaaagttccgaagcaggattctgagcgggctggcaaggc

SEQ ID NO: 640 - DNA, 495 bp, Artificial Sequence
  source: /note="Description of Artificial Sequence: Synthetic polynucleotide"
gcctccctcgcgccatcagcgttacttgcaggattctggattccagcccctttttgcaagttcccagctgtccagccttgacttactcacctacaacagtgagccaacttccctctccaaaatatatggtgtttcgtcgaccgttacttgcaggatttcactggtggcacacaggtacatggctgtgtcccccaggcctggtgagcggatgtcaagaaagcagaaagaagtgttcggcctcctggattggaagttatcaggggtgtctgcttcattgttaaaatctttgtcatagtagtggaacagcagctttggggcctgacttgacttctgctggtaccagtacatgacgttatggttcaaagtctgagaacaactcagggtcactggctttccaaactgggtaacctggtatcttgggttctggatgaccatggcatccccatgacctgtagagaaacgttacttgcaggattctgagcgggctggcaaggc

SEQ ID NO: 641 - DNA, 495 bp, Artificial Sequence
  source: /note="Description of Artificial Sequence: Synthetic polynucleotide"
gcctccctcgcgccatcagtaggagacgcaggattctcctggaactccgaccttatgatacactatcccgaaagaagtcttttacatacccaagacagagagctgggttccactgccaaaaaacagtttttcattgtcgactaggagacgcaggatttcactggtggcacacaggtacatggctgtgtcccccaggcctggtgagcggatgtcaagaaagcagaaagaagtgttcggcctcctggattggaagttatcaggggtgtctgcttcattgttaaaatctttgtcatagtagtggaacagcagctttggggcctgacttgacttctgctggtaccagtacatgacgttatggttcaaagtctgagaacaactcagggtcactggctttccaaactgggtaacctggtatcttgggttctggatgaccatggcatccccatgacctgtagagaaataggagacgcaggattctgagcgggctggcaaggc

SEQ ID NO: 642 - DNA, 495 bp, Artificial Sequence
  source: /note="Description of Artificial Sequence: Synthetic polynucleotide"
gcctccctcgcgccatcaggacactctgcaggattagagaactctgccttcaagggacaatggccataccaccctgattctgcaacttacctaggatggagagtcgagtcccatcaccaaaatgctggggctgatgtcgacgacactctgcaggatttcactggtggcacacaggtacatggctgtgtcccccaggcctggtgagcggatgtcaagaaagcagaaagaagtgttcggcctcctggattggaagttatcaggggtgtctgcttcattgttaaaatctttgtcatagtagtggaacagcagctttggggcctgacttgacttctgctggtaccagtacatgacgttatggttcaaagtctgagaacaactcagggtcactggctttccaaactgggtaacctggtatcttgggttctggatgaccatggcatccccatgacctgtagagaaagacactctgcaggattctgagcgggctggcaaggc

SEQ ID NO: 643 - DNA, 495 bp, Artificial Sequence
  source: /note="Description of Artificial Sequence: Synthetic polynucleotide"
gcctccctcgcgccatcagttcggaacgcaggattatcattgcagtcaaacccaggcacccccgagtcaagagtggagcccccatacctgtcacagtgagcctggtcccgttcccaaagtggaggggtgaattatgtcgacttcggaacgcaggatttcactggtggcacacaggtacatggctgtgtcccccaggcctggtgagcggatgtcaagaaagcagaaagaagtgttcggcctcctggattggaagttatcaggggtgtctgcttcattgttaaaatctttgtcatagtagtggaacagcagctttggggcctgacttgacttctgctggtaccagtacatgacgttatggttcaaagtctgagaacaactcagggtcactggctttccaaactgggtaacctggtatcttgggttctggatgaccatggcatccccatgacctgtagagaaattcggaacgcaggattctgagcgggctggcaaggc

SEQ ID NO: 644 - DNA, 495 bp, Artificial Sequence
  source: /note="Description of Artificial Sequence: Synthetic polynucleotide"
gcctccctcgcgccatcagaagtaacggcaggattgggtcgtgcaggctgggctgctcaccctctctcccacctggagcccccttcttacctagcacggtgagccgtgtccctggcccgaagaactgctcattgtgtcgacaagtaacggcaggatttcactggtggcacacaggtacatggctgtgtcccccaggcctggtgagcggatgtcaagaaagcagaaagaagtgttcggcctcctggattggaagttatcaggggtgtctgcttcattgttaaaatctttgtcatagtagtggaacagcagctttggggcctgacttgacttctgctggtaccagtacatgacgttatggttcaaagtctgagaacaactcagggtcactggctttccaaactgggtaacctggtatcttgggttctggatgaccatggcatccccatgacctgtagagaaaaagtaacggcaggattctgagcgggctggcaaggc

SEQ ID NO: 645 - DNA, 495 bp, Artificial Sequence
  source: /note="Description of Artificial Sequence: Synthetic polynucleotide"
gcctccctcgcgccatcaggtctcctagcaggattcctctgcccatcccgccctctcggagctctccggagccccaaccgcctccttacccagtacggtcagcctagagccttctccaaaaaacagctccccggtgtcgacgtctcctagcaggatttcactggtggcacacaggtacatggctgtgtcccccaggcctggtgagcggatgtcaagaaagcagaaagaagtgttcggcctcctggattggaagttatcaggggtgtctgcttcattgttaaaatctttgtcatagtagtggaacagcagctttggggcctgacttgacttctgctggtaccagtacatgacgttatggttcaaagtctgagaacaactcagggtcactggctttccaaactgggtaacctggtatcttgggttctggatgaccatggcatccccatgacctgtagagaaagtctcctagcaggattctgagcgggctggcaaggc

SEQ ID NO: 646 - DNA, 495 bp, Artificial Sequence
  source: /note="Description of Artificial Sequence: Synthetic polynucleotide"
gcctccctcgcgccatcaggtagacacgcaggattgcgtcccggggcgccccctccccagttccggggcttcagcgggagcccccgcttaccgagcactgtcagccgggtgcctgggccaaaatactgcgtatctgtcgacgtagacacgcaggatttcactggtggcacacaggtacatggctgtgtcccccaggcctggtgagcggatgtcaagaaagcagaaagaagtgttcggcctcctggattggaagttatcaggggtgtctgcttcattgttaaaatctttgtcatagtagtggaacagcagctttggggcctgacttgacttctgctggtaccagtacatgacgttatggttcaaagtctgagaacaactcagggtcactggctttccaaactgggtaacctggtatcttgggttctggatgaccatggcatccccatgacctgtagagaaagtagacacgcaggattctgagcgggctggcaaggc

SEQ ID NO: 647 - DNA, 495 bp, Artificial Sequence
  source: /note="Description of Artificial Sequence: Synthetic polynucleotide"
gcctccctcgcgccatcagcactgtacgcaggattcgcacaaaaacccgagcgcagtctcgtccccggtcccccggcggccccagcttacccagcactgagagccgggtcccggcgccgaagtactgaatgttttgtcgaccactgtacgcaggatttcactggtggcacacaggtacatggctgtgtcccccaggcctggtgagcggatgtcaagaaagcagaaagaagtgttcggcctcctggattggaagttatcaggggtgtctgcttcattgttaaaatctttgtcatagtagtggaacagcagctttggggcctgacttgacttctgctggtaccagtacatgacgttatggttcaaagtctgagaacaactcagggtcactggctttccaaactgggtaacctggtatcttgggttctggatgaccatggcatccccatgacctgtagagaaacactgtacgcaggattctgagcgggctggcaaggc

SEQ ID NO: 648 - DNA, 495 bp, Artificial Sequence
  source: /note="Description of Artificial Sequence: Synthetic polynucleotide"
gcctccctcgcgccatcaggatgatccgcaggattccccgcaaaaaccagacccaagccgcccgcgcccgcgccccagcagcccgcgctcaccgagcaccaggagccgcgtgcctggcccgaagtactgggtctcgtcgacgatgatccgcaggatttcactggtggcacacaggtacatggctgtgtcccccaggcctggtgagcggatgtcaagaaagcagaaagaagtgttcggcctcctggattggaagttatcaggggtgtctgcttcattgttaaaatctttgtcatagtagtggaacagcagctttggggcctgacttgacttctgctggtaccagtacatgacgttatggttcaaagtctgagaacaactcagggtcactggctttccaaactgggtaacctggtatcttgggttctggatgaccatggcatccccatgacctgtagagaaagatgatccgcaggattctgagcgggctggcaaggc

SEQ ID NO: 649 - DNA, 495 bp, Artificial Sequence
  source: /note="Description of Artificial Sequence: Synthetic polynucleotide"
gcctccctcgcgccatcagcgccaatagcaggattccgccgccttccacctgaatcccgccgcccgggtggtcccgcgaaaactcacccagcacggtcagcctgctgccggccccgaaagtcaggacgttggcccgtcgaccgccaatagcaggatttcactggtggcacacaggtacatggctgtgtcccccaggcctggtgagcggatgtcaagaaagcagaaagaagtgttcggcctcctggattggaagttatcaggggtgtctgcttcattgttaaaatctttgtcatagtagtggaacagcagctttggggcctgacttgacttctgctggtaccagtacatgacgttatggttcaaagtctgagaacaactcagggtcactggctttccaaactgggtaacctggtatcttgggttctggatgaccatggcatccccatgacctgtagagaaacgccaatagcaggattctgagcgggctggcaaggc

SEQ ID NO: 650 - DNA, 495 bp, Artificial Sequence
  source: /note="Description of Artificial Sequence: Synthetic polynucleotide"
gcctccctcgcgccatcagtcaagcctgcaggattccaccctccgactccggggaccgaggggctggaaggtggggagacgcccgaatctcacctgtgaccgtgagcctggtgcccggcccgaagtactgctcgtgtcgactcaagcctgcaggatttcactggtggcacacaggtacatggctgtgtcccccaggcctggtgagcggatgtcaagaaagcagaaagaagtgttcggcctcctggattggaagttatcaggggtgtctgcttcattgttaaaatctttgtcatagtagtggaacagcagctttggggcctgacttgacttctgctggtaccagtacatgacgttatggttcaaagtctgagaacaactcagggtcactggctttccaaactgggtaacctggtatcttgggttctggatgaccatggcatccccatgacctgtagagaaatcaagcctgcaggattctgagcgggctggcaaggc

SEQ ID NO: 651 - DNA, 495 bp, Artificial Sequence
  source: /note="Description of Artificial Sequence: Synthetic polynucleotide"
gcctccctcgcgccatcagagagtgtcaggtctcactgtggacccacttttccctgtgacggatctgcaaaagaacctgaaaaatgtcttacctacaactgtgagtctggtgccttgtccaaagaaagcttcagtgtcgacagagtgtcaggtctcatcactgctggcacaaaaatacactgctgaatcctcaagcttcgtagcctggatctcaaggctacagggtgaatttgggaggcacttagctgaaaatctttccttgggcatacctgtttcatcaaagacattttcattctggaaggaaatcaagaacttgaactcgtttttcaggacctgttggtaccaaaaaacataactgtgtccttttattggggcacaatataattttgctttctgtccttcccctctgacaagatgttttggagtctgggcgacttcttcaccaggagaacctgtaaagagagtgtcaggtctcactgagcgggctggcaaggc

SEQ ID NO: 652 - DNA, 495 bp, Artificial Sequence
  source: /note="Description of Artificial Sequence: Synthetic polynucleotide"
gcctccctcgcgccatcaggttccgaaaggtctcaatttcccaggacagagtcctccctcatcgcacccctcctagagacccccagccttacctacaacggttaacctggtccccgaaccgaaggtgtagccatagtcgacgttccgaaaggtctcatcactgctggcacaaaaatacactgctgaatcctcaagcttcgtagcctggatctcaaggctacagggtgaatttgggaggcacttagctgaaaatctttccttgggcatacctgtttcatcaaagacattttcattctggaaggaaatcaagaacttgaactcgtttttcaggacctgttggtaccaaaaaacataactgtgtccttttattggggcacaatataattttgctttctgtccttcccctctgacaagatgttttggagtctgggcgacttcttcaccaggagaacctgtaaaggttccgaaaggtctcactgagcgggctggcaaggc

SEQ ID NO: 653 - DNA, 495 bp, Artificial Sequence
  source: /note="Description of Artificial Sequence: Synthetic polynucleotide"
gcctccctcgcgccatcagcgttacttaggtctcactggattccagcccctttttgcaagttcccagctgtccagccttgacttactcacctacaacagtgagccaacttccctctccaaaatatatggtgtttcgtcgaccgttacttaggtctcatcactgctggcacaaaaatacactgctgaatcctcaagcttcgtagcctggatctcaaggctacagggtgaatttgggaggcacttagctgaaaatctttccttgggcatacctgtttcatcaaagacattttcattctggaaggaaatcaagaacttgaactcgtttttcaggacctgttggtaccaaaaaacataactgtgtccttttattggggcacaatataattttgctttctgtccttcccctctgacaagatgttttggagtctgggcgacttcttcaccaggagaacctgtaaagcgttacttaggtctcactgagcgggctggcaaggc

SEQ ID NO: 654 - DNA, 495 bp, Artificial Sequence
  source: /note="Description of Artificial Sequence: Synthetic polynucleotide"
gcctccctcgcgccatcagtaggagacaggtctcactcctggaactccgaccttatgatacactatcccgaaagaagtcttttacatacccaagacagagagctgggttccactgccaaaaaacagtttttcattgtcgactaggagacaggtctcatcactgctggcacaaaaatacactgctgaatcctcaagcttcgtagcctggatctcaaggctacagggtgaatttgggaggcacttagctgaaaatctttccttgggcatacctgtttcatcaaagacattttcattctggaaggaaatcaagaacttgaactcgtttttcaggacctgttggtaccaaaaaacataactgtgtccttttattggggcacaatataattttgctttctgtccttcccctctgacaagatgttttggagtctgggcgacttcttcaccaggagaacctgtaaagtaggagacaggtctcactgagcgggctggcaaggc

SEQ ID NO: 655 - DNA, 495 bp, Artificial Sequence
  source: /note="Description of Artificial Sequence: Synthetic polynucleotide"
gcctccctcgcgccatcaggacactctaggtctcaagagaactctgccttcaagggacaatggccataccaccctgattctgcaacttacctaggatggagagtcgagtcccatcaccaaaatgctggggctgatgtcgacgacactctaggtctcatcactgctggcacaaaaatacactgctgaatcctcaagcttcgtagcctggatctcaaggctacagggtgaatttgggaggcacttagctgaaaatctttccttgggcatacctgtttcatcaaagacattttcattctggaaggaaatcaagaacttgaactcgtttttcaggacctgttggtaccaaaaaacataactgtgtccttttattggggcacaatataattttgctttctgtccttcccctctgacaagatgttttggagtctgggcgacttcttcaccaggagaacctgtaaaggacactctaggtctcactgagcgggctggcaaggc

SEQ ID NO: 656 - DNA, 495 bp, Artificial Sequence
  source: /note="Description of Artificial Sequence: Synthetic polynucleotide"
gcctccctcgcgccatcagttcggaacaggtctcaatcattgcagtcaaacccaggcacccccgagtcaagagtggagcccccatacctgtcacagtgagcctggtcccgttcccaaagtggaggggtgaattatgtcgacttcggaacaggtctcatcactgctggcacaaaaatacactgctgaatcctcaagcttcgtagcctggatctcaaggctacagggtgaatttgggaggcacttagctgaaaatctttccttgggcatacctgtttcatcaaagacattttcattctggaaggaaatcaagaacttgaactcgtttttcaggacctgttggtaccaaaaaacataactgtgtccttttattggggcacaatataattttgctttctgtccttcccctctgacaagatgttttggagtctgggcgacttcttcaccaggagaacctgtaaagttcggaacaggtctcactgagcgggctggcaaggc

SEQ ID NO: 657 - DNA, 495 bp, Artificial Sequence
  source: /note="Description of Artificial Sequence: Synthetic polynucleotide"
gcctccctcgcgccatcagaagtaacgaggtctcagggtcgtgcaggctgggctgctcaccctctctcccacctggagcccccttcttacctagcacggtgagccgtgtccctggcccgaagaactgctcattgtgtcgacaagtaacgaggtctcatcactgctggcacaaaaatacactgctgaatcctcaagcttcgtagcctggatctcaaggctacagggtgaatttgggaggcacttagctgaaaatctttccttgggcatacctgtttcatcaaagacattttcattctggaaggaaatcaagaacttgaactcgtttttcaggacctgttggtaccaaaaaacataactgtgtccttttattggggcacaatataattttgctttctgtccttcccctctgacaagatgttttggagtctgggcgacttcttcaccaggagaacctgtaaagaagtaacgaggtctcactgagcgggctggcaaggc

SEQ ID NO: 658 - DNA, 495 bp, Artificial Sequence
  source: /note="Description of Artificial Sequence: Synthetic polynucleotide"
gcctccctcgcgccatcaggtctcctaaggtctcacctctgcccatcccgccctctcggagctctccggagccccaaccgcctccttacccagtacggtcagcctagagccttctccaaaaaacagctccccggtgtcgacgtctcctaaggtctcatcactgctggcacaaaaatacactgctgaatcctcaagcttcgtagcctggatctcaaggctacagggtgaatttgggaggcacttagctgaaaatctttccttgggcatacctgtttcatcaaagacattttcattctggaaggaaatcaagaacttgaactcgtttttcaggacctgttggtaccaaaaaacataactgtgtccttttattggggcacaatataattttgctttctgtccttcccctctgacaagatgttttggagtctgggcgacttcttcaccaggagaacctgtaaaggtctcctaaggtctcactgagcgggctggcaaggc

SEQ ID NO: 659 - DNA, 495 bp, Artificial Sequence
  source: /note="Description of Artificial Sequence: Synthetic polynucleotide"
gcctccctcgcgccatcaggtagacacaggtctcagcgtcccggggcgccccctccccagttccggggcttcagcgggagcccccgcttaccgagcactgtcagccgggtgcctgggccaaaatactgcgtatctgtcgacgtagacacaggtctcatcactgctggcacaaaaatacactgctgaatcctcaagcttcgtagcctggatctcaaggctacagggtgaatttgggaggcacttagctgaaaatctttccttgggcatacctgtttcatcaaagacattttcattctggaaggaaatcaagaacttgaactcgtttttcaggacctgttggtaccaaaaaacataactgtgtccttttattggggcacaatataattttgctttctgtccttcccctctgacaagatgttttggagtctgggcgacttcttcaccaggagaacctgtaaaggtagacacaggtctcactgagcgggctggcaaggc

SEQ ID NO: 660 - DNA, 495 bp, Artificial Sequence
  source: /note="Description of Artificial Sequence: Synthetic polynucleotide"
gcctccctcgcgccatcagcactgtacaggtctcacgcacaaaaacccgagcgcagtctcgtccccggtcccccggcggccccagcttacccagcactgagagccgggtcccggcgccgaagtactgaatgttttgtcgaccactgtacaggtctcatcactgctggcacaaaaatacactgctgaatcctcaagcttcgtagcctggatctcaaggctacagggtgaatttgggaggcacttagctgaaaatctttccttgggcatacctgtttcatcaaagacattttcattctggaaggaaatcaagaacttgaactcgtttttcaggacctgttggtaccaaaaaacataactgtgtccttttattggggcacaatataattttgctttctgtccttcccctctgacaagatgttttggagtctgggcgacttcttcaccaggagaacctgtaaagcactgtacaggtctcactgagcgggctggcaaggc

SEQ ID NO: 661 - DNA, 495 bp, Artificial Sequence
  source: /note="Description of Artificial Sequence: Synthetic polynucleotide"
gcctccctcgcgccatcaggatgatccaggtctcaccccgcaaaaaccagacccaagccgcccgcgcccgcgccccagcagcccgcgctcaccgagcaccaggagccgcgtgcctggcccgaagtactgggtctcgtcgacgatgatccaggtctcatcactgctggcacaaaaatacactgctgaatcctcaagcttcgtagcctggatctcaaggctacagggtgaatttgggaggcacttagctgaaaatctttccttgggcatacctgtttcatcaaagacattttcattctggaaggaaatcaagaacttgaactcgtttttcaggacctgttggtaccaaaaaacataactgtgtccttttattggggcacaatataattttgctttctgtccttcccctctgacaagatgttttggagtctgggcgacttcttcaccaggagaacctgtaaaggatgatccaggtctcactgagcgggctggcaaggc

SEQ ID NO: 662 - DNA, 495 bp, Artificial Sequence
  source: /note="Description of Artificial Sequence: Synthetic polynucleotide"
gcctccctcgcgccatcagcgccaataaggtctcaccgccgccttccacctgaatcccgccgcccgggtggtcccgcgaaaactcacccagcacggtcagcctgctgccggccccgaaagtcaggacgttggcccgtcgaccgccaataaggtctcatcactgctggcacaaaaatacactgctgaatcctcaagcttcgtagcctggatctcaaggctacagggtgaatttgggaggcacttagctgaaaatctttccttgggcatacctgtttcatcaaagacattttcattctggaaggaaatcaagaacttgaactcgtttttcaggacctgttggtaccaaaaaacataactgtgtccttttattggggcacaatataattttgctttctgtccttcccctctgacaagatgttttggagtctgggcgacttcttcaccaggagaacctgtaaagcgccaataaggtctcactgagcgggctggcaaggc

SEQ ID NO: 663 - DNA, 495 bp, Artificial Sequence
  source: /note="Description of Artificial Sequence: Synthetic polynucleotide"
gcctccctcgcgccatcagtcaagcctaggtctcaccaccctccgactccggggaccgaggggctggaaggtggggagacgcccgaatctcacctgtgaccgtgagcctggtgcccggcccgaagtactgctcgtgtcgactcaagcctaggtctcatcactgctggcacaaaaatacactgctgaatcctcaagcttcgtagcctggatctcaaggctacagggtgaatttgggaggcacttagctgaaaatctttccttgggcatacctgtttcatcaaagacattttcattctggaaggaaatcaagaacttgaactcgtttttcaggacctgttggtaccaaaaaacataactgtgtccttttattggggcacaatataattttgctttctgtccttcccctctgacaagatgttttggagtctgggcgacttcttcaccaggagaacctgtaaagtcaagcctaggtctcactgagcgggctggcaaggc

SEQ ID NO: 664 - DNA, 495 bp, Artificial Sequence
  source: /note="Description of Artificial Sequence: Synthetic polynucleotide"
gcctccctcgcgccatcagagagtgtcgtccattcctgtggacccacttttccctgtgacggatctgcaaaagaacctgaaaaatgtcttacctacaactgtgagtctggtgccttgtccaaagaaagcttcagtgtcgacagagtgtcgtccattctcactactgtagagatacacggctgagtccctcggctctgcgggatggatcttcagcgtggaagacgttccgttaggtctttcagctgtgaatcgttccttgggcatccctgaatcaactgcaatgttttggtactggaaggaaatcagcaacttcatttcttgcctcagattctgtcggtaccagtgaacaaacatgtgaccagaagatggatcgcacctcagaatcacctcctgtcccatgttggtgaccttgtgtctgggggtctggctgactccaggctccgagtgtcctgtggaagaaagagtgtcgtccattcctgagcgggctggcaaggc

SEQ ID NO: 665 - DNA, 495 bp, Artificial Sequence
  source: /note="Description of Artificial Sequence: Synthetic polynucleotide"
gcctccctcgcgccatcaggttccgaagtccattcatttcccaggacagagtcctccctcatcgcacccctcctagagacccccagccttacctacaacggttaacctggtccccgaaccgaaggtgtagccatagtcgacgttccgaagtccattctcactactgtagagatacacggctgagtccctcggctctgcgggatggatcttcagcgtggaagacgttccgttaggtctttcagctgtgaatcgttccttgggcatccctgaatcaactgcaatgttttggtactggaaggaaatcagcaacttcatttcttgcctcagattctgtcggtaccagtgaacaaacatgtgaccagaagatggatcgcacctcagaatcacctcctgtcccatgttggtgaccttgtgtctgggggtctggctgactccaggctccgagtgtcctgtggaagaagttccgaagtccattcctgagcgggctggcaaggc

SEQ ID NO: 666 - DNA, 495 bp, Artificial Sequence
  source: /note="Description of Artificial Sequence: Synthetic polynucleotide"
gcctccctcgcgccatcagcgttacttgtccattcctggattccagcccctttttgcaagttcccagctgtccagccttgacttactcacctacaacagtgagccaacttccctctccaaaatatatggtgtttcgtcgaccgttacttgtccattctcactactgtagagatacacggctgagtccctcggctctgcgggatggatcttcagcgtggaagacgttccgttaggtctttcagctgtgaatcgttccttgggcatccctgaatcaactgcaatgttttggtactggaaggaaatcagcaacttcatttcttgcctcagattctgtcggtaccagtgaacaaacatgtgaccagaagatggatcgcacctcagaatcacctcctgtcccatgttggtgaccttgtgtctgggggtctggctgactccaggctccgagtgtcctgtggaagaacgttacttgtccattcctgagcgggctggcaaggc

SEQ ID NO: 667 - DNA, 495 bp, Artificial Sequence
  source: /note="Description of Artificial Sequence: Synthetic polynucleotide"
gcctccctcgcgccatcagtaggagacgtccattcctcctggaactccgaccttatgatacactatcccgaaagaagtcttttacatacccaagacagagagctgggttccactgccaaaaaacagtttttcattgtcgactaggagacgtccattctcactactgtagagatacacggctgagtccctcggctctgcgggatggatcttcagcgtggaagacgttccgttaggtctttcagctgtgaatcgttccttgggcatccctgaatcaactgcaatgttttggtactggaaggaaatcagcaacttcatttcttgcctcagattctgtcggtaccagtgaacaaacatgtgaccagaagatggatcgcacctcagaatcacctcctgtcccatgttggtgaccttgtgtctgggggtctggctgactccaggctccgagtgtcctgtggaagaataggagacgtccattcctgagcgggctggcaaggc

SEQ ID NO: 668 - DNA, 495 bp, Artificial Sequence
  source: /note="Description of Artificial Sequence: Synthetic polynucleotide"
gcctccctcgcgccatcaggacactctgtccattcagagaactctgccttcaagggacaatggccataccaccctgattctgcaacttacctaggatggagagtcgagtcccatcaccaaaatgctggggctgatgtcgacgacactctgtccattctcactactgtagagatacacggctgagtccctcggctctgcgggatggatcttcagcgtggaagacgttccgttaggtctttcagctgtgaatcgttccttgggcatccctgaatcaactgcaatgttttggtactggaaggaaatcagcaacttcatttcttgcctcagattctgtcggtaccagtgaacaaacatgtgaccagaagatggatcgcacctcagaatcacctcctgtcccatgttggtgaccttgtgtctgggggtctggctgactccaggctccgagtgtcctgtggaagaagacactctgtccattcctgagcgggctggcaaggc

SEQ ID NO: 669 - DNA, 495 bp, Artificial Sequence
  source: /note="Description of Artificial Sequence: Synthetic polynucleotide"
gcctccctcgcgccatcagttcggaacgtccattcatcattgcagtcaaacccaggcacccccgagtcaagagtggagcccccatacctgtcacagtgagcctggtcccgttcccaaagtggaggggtgaattatgtcgacttcggaacgtccattctcactactgtagagatacacggctgagtccctcggctctgcgggatggatcttcagcgtggaagacgttccgttaggtctttcagctgtgaatcgttccttgggcatccctgaatcaactgcaatgttttggtactggaaggaaatcagcaacttcatttcttgcctcagattctgtcggtaccagtgaacaaacatgtgaccagaagatggatcgcacctcagaatcacctcctgtcccatgttggtgaccttgtgtctgggggtctggctgactccaggctccgagtgtcctgtggaagaattcggaacgtccattcctgagcgggctggcaaggc

SEQ ID NO: 670 - DNA, 495 bp, Artificial Sequence
  source: /note="Description of Artificial Sequence: Synthetic polynucleotide"
gcctccctcgcgccatcagaagtaacggtccattcgggtcgtgcaggctgggctgctcaccctctctcccacctggagcccccttcttacctagcacggtgagccgtgtccctggcccgaagaactgctcattgtgtcgacaagtaacggtccattctcactactgtagagatacacggctgagtccctcggctctgcgggatggatcttcagcgtggaagacgttccgttaggtctttcagctgtgaatcgttccttgggcatccctgaatcaactgcaatgttttggtactggaaggaaatcagcaacttcatttcttgcctcagattctgtcggtaccagtgaacaaacatgtgaccagaagatggatcgcacctcagaatcacctcctgtcccatgttggtgaccttgtgtctgggggtctggctgactccaggctccgagtgtcctgtggaagaaaagtaacggtccattcctgagcgggctggcaaggc

SEQ ID NO: 671 - DNA, 495 bp, Artificial Sequence
  source: /note="Description of Artificial Sequence: Synthetic polynucleotide"
gcctccctcgcgccatcaggtctcctagtccattccctctgcccatcccgccctctcggagctctccggagccccaaccgcctccttacccagtacggtcagcctagagccttctccaaaaaacagctccccggtgtcgacgtctcctagtccattctcactactgtagagatacacggctgagtccctcggctctgcgggatggatcttcagcgtggaagacgttccgttaggtctttcagctgtgaatcgttccttgggcatccctgaatcaactgcaatgttttggtactggaaggaaatcagcaacttcatttcttgcctcagattctgtcggtaccagtgaacaaacatgtgaccagaagatggatcgcacctcagaatcacctcctgtcccatgttggtgaccttgtgtctgggggtctggctgactccaggctccgagtgtcctgtggaagaagtctcctagtccattcctgagcgggctggcaaggc

SEQ ID NO: 672 - DNA, 495 bp, Artificial Sequence
  source: /note="Description of Artificial Sequence: Synthetic polynucleotide"
gcctccctcgcgccatcaggtagacacgtccattcgcgtcccggggcgccccctccccagttccggggcttcagcgggagcccccgcttaccgagcactgtcagccgggtgcctgggccaaaatactgcgtatctgtcgacgtagacacgtccattctcactactgtagagatacacggctgagtccctcggctctgcgggatggatcttcagcgtggaagacgttccgttaggtctttcagctgtgaatcgttccttgggcatccctgaatcaactgcaatgttttggtactggaaggaaatcagcaacttcatttcttgcctcagattctgtcggtaccagtgaacaaacatgtgaccagaagatggatcgcacctcagaatcacctcctgtcccatgttggtgaccttgtgtctgggggtctggctgactccaggctccgagtgtcctgtggaagaagtagacacgtccattcctgagcgggctggcaaggc

SEQ ID NO: 673 - DNA, 495 bp, Artificial Sequence
  source: /note="Description of Artificial Sequence: Synthetic polynucleotide"
gcctccctcgcgccatcagcactgtacgtccattccgcacaaaaacccgagcgcagtctcgtccccggtcccccggcggccccagcttacccagcactgagagccgggtcccggcgccgaagtactgaatgttttgtcgaccactgtacgtccattctcactactgtagagatacacggctgagtccctcggctctgcgggatggatcttcagcgtggaagacgttccgttaggtctttcagctgtgaatcgttccttgggcatccctgaatcaactgcaatgttttggtactggaaggaaatcagcaacttcatttcttgcctcagattctgtcggtaccagtgaacaaacatgtgaccagaagatggatcgcacctcagaatcacctcctgtcccatgttggtgaccttgtgtctgggggtctggctgactccaggctccgagtgtcctgtggaagaacactgtacgtccattcctgagcgggctggcaaggc

SEQ ID NO: 674 - DNA, 495 bp, Artificial Sequence
  source: /note="Description of Artificial Sequence: Synthetic polynucleotide"
gcctccctcgcgccatcaggatgatccgtccattcccccgcaaaaaccagacccaagccgcccgcgcccgcgccccagcagcccgcgctcaccgagcaccaggagccgcgtgcctggcccgaagtactgggtctcgtcgacgatgatccgtccattctcactactgtagagatacacggctgagtccctcggctctgcgggatggatcttcagcgtggaagacgttccgttaggtctttcagctgtgaatcgttccttgggcatccctgaatcaactgcaatgttttggtactggaaggaaatcagcaacttcatttcttgcctcagattctgtcggtaccagtgaacaaacatgtgaccagaagatggatcgcacctcagaatcacctcctgtcccatgttggtgaccttgtgtctgggggtctggctgactccaggctccgagtgtcctgtggaagaagatgatccgtccattcctgagcgggctggcaaggc

SEQ ID NO: 675 - DNA, 495 bp, Artificial Sequence
  source: /note="Description of Artificial Sequence: Synthetic polynucleotide"
gcctccctcgcgccatcagcgccaatagtccattcccgccgccttccacctgaatcccgccgcccgggtggtcccgcgaaaactcacccagcacggtcagcctgctgccggccccgaaagtcaggacgttggcccgtcgaccgccaatagtccattctcactactgtagagatacacggctgagtccctcggctctgcgggatggatcttcagcgtggaagacgttccgttaggtctttcagctgtgaatcgttccttgggcatccctgaatcaactgcaatgttttggtactggaaggaaatcagcaacttcatttcttgcctcagattctgtcggtaccagtgaacaaacatgtgaccagaagatggatcgcacctcagaatcacctcctgtcccatgttggtgaccttgtgtctgggggtctggctgactccaggctccgagtgtcctgtggaagaacgccaatagtccattcctgagcgggctggcaaggc

SEQ ID NO: 676 - DNA, 495 bp, Artificial Sequence
  source: /note="Description of Artificial Sequence: Synthetic polynucleotide"
gcctccctcgcgccatcagtcaagcctgtccattcccaccctccgactccggggaccgaggggctggaaggtggggagacgcccgaatctcacctgtgaccgtgagcctggtgcccggcccgaagtactgctcgtgtcgactcaagcctgtccattctcactactgtagagatacacggctgagtccctcggctctgcgggatggatcttcagcgtggaagacgttccgttaggtctttcagctgtgaatcgttccttgggcatccctgaatcaactgcaatgttttggtactggaaggaaatcagcaacttcatttcttgcctcagattctgtcggtaccagtgaacaaacatgtgaccagaagatggatcgcacctcagaatcacctcctgtcccatgttggtgaccttgtgtctgggggtctggctgactccaggctccgagtgtcctgtggaagaatcaagcctgtccattcctgagcgggctggcaaggc

SEQ ID NO: 677 - DNA, 495 bp, Artificial Sequence
  source: /note="Description of Artificial Sequence: Synthetic polynucleotide"
gcctccctcgcgccatcagagagtgtcgcataactctgtggacccacttttccctgtgacggatctgcaaaagaacctgaaaaatgtcttacctacaactgtgagtctggtgccttgtccaaagaaagcttcagtgtcgacagagtgtcgcataacttcagagctggcacagaaataagctgccgaatctcctcgcactacctgctggatcctcaggatgctggggccctctttgggaaattcagcagaaaatcgttcctttggcattcctgactcatctatgatattttctttctggagataaaccatgaatttcagaccttcctctgggagctgccgataccagtaaacatgactgtgtcctttcattgggctgcatctcagtcttgcctcctgtcccctcctcctgaccaggtgtcttgggttctgcatgacgccggcatttgagagacctcagaggagagtgtcgcataactctgagcgggctggcaaggc

SEQ ID NO: 678 - DNA, 495 bp, Artificial Sequence
  source: /note="Description of Artificial Sequence: Synthetic polynucleotide"
gcctccctcgcgccatcaggttccgaagcataactatttcccaggacagagtcctccctcatcgcacccctcctagagacccccagccttacctacaacggttaacctggtccccgaaccgaaggtgtagccatagtcgacgttccgaagcataacttcagagctggcacagaaataagctgccgaatctcctcgcactacctgctggatcctcaggatgctggggccctctttgggaaattcagcagaaaatcgttcctttggcattcctgactcatctatgatattttctttctggagataaaccatgaatttcagaccttcctctgggagctgccgataccagtaaacatgactgtgtcctttcattgggctgcatctcagtcttgcctcctgtcccctcctcctgaccaggtgtcttgggttctgcatgacgccggcatttgagagacctcagagggttccgaagcataactctgagcgggctggcaaggc

SEQ ID NO: 679 - DNA, 495 bp, Artificial Sequence
  source: /note="Description of Artificial Sequence: Synthetic polynucleotide"
gcctccctcgcgccatcagcgttacttgcataactctggattccagcccctttttgcaagttcccagctgtccagccttgacttactcacctacaacagtgagccaacttccctctccaaaatatatggtgtttcgtcgaccgttacttgcataacttcagagctggcacagaaataagctgccgaatctcctcgcactacctgctggatcctcaggatgctggggccctctttgggaaattcagcagaaaatcgttcctttggcattcctgactcatctatgatattttctttctggagataaaccatgaatttcagaccttcctctgggagctgccgataccagtaaacatgactgtgtcctttcattgggctgcatctcagtcttgcctcctgtcccctcctcctgaccaggtgtcttgggttctgcatgacgccggcatttgagagacctcagaggcgttacttgcataactctgagcgggctggcaaggc

SEQ ID NO: 680 - DNA, 495 bp, Artificial Sequence
  source: /note="Description of Artificial Sequence: Synthetic polynucleotide"
gcctccctcgcgccatcagtaggagacgcataactctcctggaactccgaccttatgatacactatcccgaaagaagtcttttacatacccaagacagagagctgggttccactgccaaaaaacagtttttcattgtcgactaggagacgcataacttcagagctggcacagaaataagctgccgaatctcctcgcactacctgctggatcctcaggatgctggggccctctttgggaaattcagcagaaaatcgttcctttggcattcctgactcatctatgatattttctttctggagataaaccatgaatttcagaccttcctctgggagctgccgataccagtaaacatgactgtgtcctttcattgggctgcatctcagtcttgcctcctgtcccctcctcctgaccaggtgtcttgggttctgcatgacgccggcatttgagagacctcagaggtaggagacgcataactctgagcgggctggcaaggc

SEQ ID NO: 681 - DNA, 495 bp, Artificial Sequence
  source: /note="Description of Artificial Sequence: Synthetic polynucleotide"
gcctccctcgcgccatcaggacactctgcataactagagaactctgccttcaagggacaatggccataccaccctgattctgcaacttacctaggatggagagtcgagtcccatcaccaaaatgctggggctgatgtcgacgacactctgcataacttcagagctggcacagaaataagctgccgaatctcctcgcactacctgctggatcctcaggatgctggggccctctttgggaaattcagcagaaaatcgttcctttggcattcctgactcatctatgatattttctttctggagataaaccatgaatttcagaccttcctctgggagctgccgataccagtaaacatgactgtgtcctttcattgggctgcatctcagtcttgcctcctgtcccctcctcctgaccaggtgtcttgggttctgcatgacgccggcatttgagagacctcagagggacactctgcataactctgagcgggctggcaaggc

SEQ ID NO: 682 - DNA, 495 bp, Artificial Sequence
  source: /note="Description of Artificial Sequence: Synthetic polynucleotide"
gcctccctcgcgccatcagttcggaacgcataactatcattgcagtcaaacccaggcacccccgagtcaagagtggagcccccatacctgtcacagtgagcctggtcccgttcccaaagtggaggggtgaattatgtcgacttcggaacgcataacttcagagctggcacagaaataagctgccgaatctcctcgcactacctgctggatcctcaggatgctggggccctctttgggaaattcagcagaaaatcgttcctttggcattcctgactcatctatgatattttctttctggagataaaccatgaatttcagaccttcctctgggagctgccgataccagtaaacatgactgtgtcctttcattgggctgcatctcagtcttgcctcctgtcccctcctcctgaccaggtgtcttgggttctgcatgacgccggcatttgagagacctcagaggttcggaacgcataactctgagcgggctggcaaggc

SEQ ID NO: 683 - DNA, 495 bp, Artificial Sequence
  source: /note="Description of Artificial Sequence: Synthetic polynucleotide"
gcctccctcgcgccatcagaagtaacggcataactgggtcgtgcaggctgggctgctcaccctctctcccacctggagcccccttcttacctagcacggtgagccgtgtccctggcccgaagaactgctcattgtgtcgacaagtaacggcataacttcagagctggcacagaaataagctgccgaatctcctcgcactacctgctggatcctcaggatgctggggccctctttgggaaattcagcagaaaatcgttcctttggcattcctgactcatctatgatattttctttctggagataaaccatgaatttcagaccttcctctgggagctgccgataccagtaaacatgactgtgtcctttcattgggctgcatctcagtcttgcctcctgtcccctcctcctgaccaggtgtcttgggttctgcatgacgccggcatttgagagacctcagaggaagtaacggcataactctgagcgggctggcaaggc

SEQ ID NO: 684 - DNA, 495 bp, Artificial Sequence
  source: /note="Description of Artificial Sequence: Synthetic polynucleotide"
gcctccctcgcgccatcaggtctcctagcataactcctctgcccatcccgccctctcggagctctccggagccccaaccgcctccttacccagtacggtcagcctagagccttctccaaaaaacagctccccggtgtcgacgtctcctagcataacttcagagctggcacagaaataagctgccgaatctcctcgcactacctgctggatcctcaggatgctggggccctctttgggaaattcagcagaaaatcgttcctttggcattcctgactcatctatgatattttctttctggagataaaccatgaatttcagaccttcctctgggagctgccgataccagtaaacatgactgtgtcctttcattgggctgcatctcagtcttgcctcctgtcccctcctcctgaccaggtgtcttgggttctgcatgacgccggcatttgagagacctcagagggtctcctagcataactctgagcgggctggcaaggc

SEQ ID NO: 685 - DNA, 495 bp, Artificial Sequence
  source: /note="Description of Artificial Sequence: Synthetic polynucleotide"
gcctccctcgcgccatcaggtagacacgcataactgcgtcccggggcgccccctccccagttccggggcttcagcgggagcccccgcttaccgagcactgtcagccgggtgcctgggccaaaatactgcgtatctgtcgacgtagacacgcataacttcagagctggcacagaaataagctgccgaatctcctcgcactacctgctggatcctcaggatgctggggccctctttgggaaattcagcagaaaatcgttcctttggcattcctgactcatctatgatattttctttctggagataaaccatgaatttcagaccttcctctgggagctgccgataccagtaaacatgactgtgtcctttcattgggctgcatctcagtcttgcctcctgtcccctcctcctgaccaggtgtcttgggttctgcatgacgccggcatttgagagacctcagagggtagacacgcataactctgagcgggctggcaaggc

SEQ ID NO: 686 - DNA, 495 bp, Artificial Sequence
  source: /note="Description of Artificial Sequence: Synthetic polynucleotide"
gcctccctcgcgccatcagcactgtacgcataactcgcacaaaaacccgagcgcagtctcgtccccggtcccccggcggccccagcttacccagcactgagagccgggtcccggcgccgaagtactgaatgttttgtcgaccactgtacgcataacttcagagctggcacagaaataagctgccgaatctcctcgcactacctgctggatcctcaggatgctggggccctctttgggaaattcagcagaaaatcgttcctttggcattcctgactcatctatgatattttctttctggagataaaccatgaatttcagaccttcctctgggagctgccgataccagtaaacatgactgtgtcctttcattgggctgcatctcagtcttgcctcctgtcccctcctcctgaccaggtgtcttgggttctgcatgacgccggcatttgagagacctcagaggcactgtacgcataactctgagcgggctggcaaggc

SEQ ID NO: 687 - DNA, 495 bp, Artificial Sequence
  source: /note="Description of Artificial Sequence: Synthetic polynucleotide"
gcctccctcgcgccatcaggatgatccgcataactccccgcaaaaaccagacccaagccgcccgcgcccgcgccccagcagcccgcgctcaccgagcaccaggagccgcgtgcctggcccgaagtactgggtctcgtcgacgatgatccgcataacttcagagctggcacagaaataagctgccgaatctcctcgcactacctgctggatcctcaggatgctggggccctctttgggaaattcagcagaaaatcgttcctttggcattcctgactcatctatgatattttctttctggagataaaccatgaatttcagaccttcctctgggagctgccgataccagtaaacatgactgtgtcctttcattgggctgcatctcagtcttgcctcctgtcccctcctcctgaccaggtgtcttgggttctgcatgacgccggcatttgagagacctcagagggatgatccgcataactctgagcgggctggcaaggc

SEQ ID NO: 688 - DNA, 495 bp, Artificial Sequence
  source: /note="Description of Artificial Sequence: Synthetic polynucleotide"
gcctccctcgcgccatcagcgccaatagcataactccgccgccttccacctgaatcccgccgcccgggtggtcccgcgaaaactcacccagcacggtcagcctgctgccggccccgaaagtcaggacgttggcccgtcgaccgccaatagcataacttcagagctggcacagaaataagctgccgaatctcctcgcactacctgctggatcctcaggatgctggggccctctttgggaaattcagcagaaaatcgttcctttggcattcctgactcatctatgatattttctttctggagataaaccatgaatttcagaccttcctctgggagctgccgataccagtaaacatgactgtgtcctttcattgggctgcatctcagtcttgcctcctgtcccctcctcctgaccaggtgtcttgggttctgcatgacgccggcatttgagagacctcagaggcgccaatagcataactctgagcgggctggcaaggc

SEQ ID NO: 689 - DNA, 495 bp, Artificial Sequence
  source: /note="Description of Artificial Sequence: Synthetic polynucleotide"
gcctccctcgcgccatcagtcaagcctgcataactccaccctccgactccggggaccgaggggctggaaggtggggagacgcccgaatctcacctgtgaccgtgagcctggtgcccggcccgaagtactgctcgtgtcgactcaagcctgcataacttcagagctggcacagaaataagctgccgaatctcctcgcactacctgctggatcctcaggatgctggggccctctttgggaaattcagcagaaaatcgttcctttggcattcctgactcatctatgatattttctttctggagataaaccatgaatttcagaccttcctctgggagctgccgataccagtaaacatgactgtgtcctttcattgggctgcatctcagtcttgcctcctgtcccctcctcctgaccaggtgtcttgggttctgcatgacgccggcatttgagagacctcagaggtcaagcctgcataactctgagcgggctggcaaggc

SEQ ID NO: 690 - DNA, 495 bp, Artificial Sequence
  source: /note="Description of Artificial Sequence: Synthetic polynucleotide"
gcctccctcgcgccatcagagagtgtcatatgctgctgtggacccacttttccctgtgacggatctgcaaaagaacctgaaaaatgtcttacctacaactgtgagtctggtgccttgtccaaagaaagcttcagtgtcgacagagtgtcatatgctgtcactactggcacagagatagaaagctgtcgggttcttttgggccgatgtcacagtgagaggaaaggattccttcttctcccgagagacgctgtacccttcagctatatctcctttctgaaagtcatttactatctgtgagtagtagatcaatctcagcccttgccctgggtcctgtcggtaccagtacatggcatcgtggttcaaattctgttcacaactcagggtcacattctgtccttcctttctgaacaggtactttggggactgagtgattccaccatccacggtgtctggaaaagaaagagtgtcatatgctgctgagcgggctggcaaggc

SEQ ID NO: 691 - DNA, 495 bp, Artificial Sequence
  source: /note="Description of Artificial Sequence: Synthetic polynucleotide"
gcctccctcgcgccatcaggttccgaaatatgctgatttcccaggacagagtcctccctcatcgcacccctcctagagacccccagccttacctacaacggttaacctggtccccgaaccgaaggtgtagccatagtcgacgttccgaaatatgctgtcactactggcacagagatagaaagctgtcgggttcttttgggccgatgtcacagtgagaggaaaggattccttcttctcccgagagacgctgtacccttcagctatatctcctttctgaaagtcatttactatctgtgagtagtagatcaatctcagcccttgccctgggtcctgtcggtaccagtacatggcatcgtggttcaaattctgttcacaactcagggtcacattctgtccttcctttctgaacaggtactttggggactgagtgattccaccatccacggtgtctggaaaagaagttccgaaatatgctgctgagcgggctggcaaggc

SEQ ID NO: 692 - DNA, 495 bp, Artificial Sequence
  source: /note="Description of Artificial Sequence: Synthetic polynucleotide"
gcctccctcgcgccatcagcgttacttatatgctgctggattccagcccctttttgcaagttcccagctgtccagccttgacttactcacctacaacagtgagccaacttccctctccaaaatatatggtgtttcgtcgaccgttacttatatgctgtcactactggcacagagatagaaagctgtcgggttcttttgggccgatgtcacagtgagaggaaaggattccttcttctcccgagagacgctgtacccttcagctatatctcctttctgaaagtcatttactatctgtgagtagtagatcaatctcagcccttgccctgggtcctgtcggtaccagtacatggcatcgtggttcaaattctgttcacaactcagggtcacattctgtccttcctttctgaacaggtactttggggactgagtgattccaccatccacggtgtctggaaaagaacgttacttatatgctgctgagcgggctggcaaggc

SEQ ID NO: 693 - DNA, 495 bp, Artificial Sequence
  source: /note="Description of Artificial Sequence: Synthetic polynucleotide"
gcctccctcgcgccatcagtaggagacatatgctgctcctggaactccgaccttatgatacactatcccgaaagaagtcttttacatacccaagacagagagctgggttccactgccaaaaaacagtttttcattgtcgactaggagacatatgctgtcactactggcacagagatagaaagctgtcgggttcttttgggccgatgtcacagtgagaggaaaggattccttcttctcccgagagacgctgtacccttcagctatatctcctttctgaaagtcatttactatctgtgagtagtagatcaatctcagcccttgccctgggtcctgtcggtaccagtacatggcatcgtggttcaaattctgttcacaactcagggtcacattctgtccttcctttctgaacaggtactttggggactgagtgattccaccatccacggtgtctggaaaagaataggagacatatgctgctgagcgggctggcaaggc

SEQ ID NO: 694 - DNA, 495 bp, Artificial Sequence
  source: /note="Description of Artificial Sequence: Synthetic polynucleotide"
gcctccctcgcgccatcaggacactctatatgctgagagaactctgccttcaagggacaatggccataccaccctgattctgcaacttacctaggatggagagtcgagtcccatcaccaaaatgctggggctgatgtcgacgacactctatatgctgtcactactggcacagagatagaaagctgtcgggttcttttgggccgatgtcacagtgagaggaaaggattccttcttctcccgagagacgctgtacccttcagctatatctcctttctgaaagtcatttactatctgtgagtagtagatcaatctcagcccttgccctgggtcctgtcggtaccagtacatggcatcgtggttcaaattctgttcacaactcagggtcacattctgtccttcctttctgaacaggtactttggggactgagtgattccaccatccacggtgtctggaaaagaagacactctatatgctgctgagcgggctggcaaggc

SEQ ID NO: 695 - DNA, 495 bp, Artificial Sequence
  source: /note="Description of Artificial Sequence: Synthetic polynucleotide"
gcctccctcgcgccatcagttcggaacatatgctgatcattgcagtcaaacccaggcacccccgagtcaagagtggagcccccatacctgtcacagtgagcctggtcccgttcccaaagtggaggggtgaattatgtcgacttcggaacatatgctgtcactactggcacagagatagaaagctgtcgggttcttttgggccgatgtcacagtgagaggaaaggattccttcttctcccgagagacgctgtacccttcagctatatctcctttctgaaagtcatttactatctgtgagtagtagatcaatctcagcccttgccctgggtcctgtcggtaccagtacatggcatcgtggttcaaattctgttcacaactcagggtcacattctgtccttcctttctgaacaggtactttggggactgagtgattccaccatccacggtgtctggaaaagaattcggaacatatgctgctgagcgggctggcaaggc

SEQ ID NO: 696 - DNA, 495 bp, Artificial Sequence
  source: /note="Description of Artificial Sequence: Synthetic polynucleotide"
gcctccctcgcgccatcagaagtaacgatatgctggggtcgtgcaggctgggctgctcaccctctctcccacctggagcccccttcttacctagcacggtgagccgtgtccctggcccgaagaactgctcattgtgtcgacaagtaacgatatgctgtcactactggcacagagatagaaagctgtcgggttcttttgggccgatgtcacagtgagaggaaaggattccttcttctcccgagagacgctgtacccttcagctatatctcctttctgaaagtcatttactatctgtgagtagtagatcaatctcagcccttgccctgggtcctgtcggtaccagtacatggcatcgtggttcaaattctgttcacaactcagggtcacattctgtccttcctttctgaacaggtactttggggactgagtgattccaccatccacggtgtctggaaaagaaaagtaacgatatgctgctgagcgggctggcaaggc

SEQ ID NO: 697 - DNA, 495 bp, Artificial Sequence
  source: /note="Description of Artificial Sequence: Synthetic polynucleotide"
gcctccctcgcgccatcaggtctcctaatatgctgcctctgcccatcccgccctctcggagctctccggagccccaaccgcctccttacccagtacggtcagcctagagccttctccaaaaaacagctccccggtgtcgacgtctcctaatatgctgtcactactggcacagagatagaaagctgtcgggttcttttgggccgatgtcacagtgagaggaaaggattccttcttctcccgagagacgctgtacccttcagctatatctcctttctgaaagtcatttactatctgtgagtagtagatcaatctcagcccttgccctgggtcctgtcggtaccagtacatggcatcgtggttcaaattctgttcacaactcagggtcacattctgtccttcctttctgaacaggtactttggggactgagtgattccaccatccacggtgtctggaaaagaagtctcctaatatgctgctgagcgggctggcaaggc

SEQ ID NO: 698 - DNA, 495 bp, Artificial Sequence
  source: /note="Description of Artificial Sequence: Synthetic polynucleotide"
gcctccctcgcgccatcaggtagacacatatgctggcgtcccggggcgccccctccccagttccggggcttcagcgggagcccccgcttaccgagcactgtcagccgggtgcctgggccaaaatactgcgtatctgtcgacgtagacacatatgctgtcactactggcacagagatagaaagctgtcgggttcttttgggccgatgtcacagtgagaggaaaggattccttcttctcccgagagacgctgtacccttcagctatatctcctttctgaaagtcatttactatctgtgagtagtagatcaatctcagcccttgccctgggtcctgtcggtaccagtacatggcatcgtggttcaaattctgttcacaactcagggtcacattctgtccttcctttctgaacaggtactttggggactgagtgattccaccatccacggtgtctggaaaagaagtagacacatatgctgctgagcgggctggcaaggc

SEQ ID NO: 699 - DNA, 495 bp, Artificial Sequence
  source: /note="Description of Artificial Sequence: Synthetic polynucleotide"
gcctccctcgcgccatcagcactgtacatatgctgcgcacaaaaacccgagcgcagtctcgtccccggtcccccggcggccccagcttacccagcactgagagccgggtcccggcgccgaagtactgaatgttttgtcgaccactgtacatatgctgtcactactggcacagagatagaaagctgtcgggttcttttgggccgatgtcacagtgagaggaaaggattccttcttctcccgagagacgctgtacccttcagctatatctcctttctgaaagtcatttactatctgtgagtagtagatcaatctcagcccttgccctgggtcctgtcggtaccagtacatggcatcgtggttcaaattctgttcacaactcagggtcacattctgtccttcctttctgaacaggtactttggggactgagtgattccaccatccacggtgtctggaaaagaacactgtacatatgctgctgagcgggctggcaaggc

SEQ ID NO: 700 - DNA, 495 bp, Artificial Sequence
  source: /note="Description of Artificial Sequence: Synthetic polynucleotide"
gcctccctcgcgccatcaggatgatccatatgctgccccgcaaaaaccagacccaagccgcccgcgcccgcgccccagcagcccgcgctcaccgagcaccaggagccgcgtgcctggcccgaagtactgggtctcgtcgacgatgatccatatgctgtcactactggcacagagatagaaagctgtcgggttcttttgggccgatgtcacagtgagaggaaaggattccttcttctcccgagagacgctgtacccttcagctatatctcctttctgaaagtcatttactatctgtgagtagtagatcaatctcagcccttgccctgggtcctgtcggtaccagtacatggcatcgtggttcaaattctgttcacaactcagggtcacattctgtccttcctttctgaacaggtactttggggactgagtgattccaccatccacggtgtctggaaaagaagatgatccatatgctgctgagcgggctggcaaggc

SEQ ID NO: 701 - DNA, 495 bp, Artificial Sequence
  source: /note="Description of Artificial Sequence: Synthetic polynucleotide"
gcctccctcgcgccatcagcgccaataatatgctgccgccgccttccacctgaatcccgccgcccgggtggtcccgcgaaaactcacccagcacggtcagcctgctgccggccccgaaagtcaggacgttggcccgtcgaccgccaataatatgctgtcactactggcacagagatagaaagctgtcgggttcttttgggccgatgtcacagtgagaggaaaggattccttcttctcccgagagacgctgtacccttcagctatatctcctttctgaaagtcatttactatctgtgagtagtagatcaatctcagcccttgccctgggtcctgtcggtaccagtacatggcatcgtggttcaaattctgttcacaactcagggtcacattctgtccttcctttctgaacaggtactttggggactgagtgattccaccatccacggtgtctggaaaagaacgccaataatatgctgctgagcgggctggcaaggc

SEQ ID NO: 702 - DNA, 495 bp, Artificial Sequence
  source: /note="Description of Artificial Sequence: Synthetic polynucleotide"
gcctccctcgcgccatcagtcaagcctatatgctgccaccctccgactccggggaccgaggggctggaaggtggggagacgcccgaatctcacctgtgaccgtgagcctggtgcccggcccgaagtactgctcgtgtcgactcaagcctatatgctgtcactactggcacagagatagaaagctgtcgggttcttttgggccgatgtcacagtgagaggaaaggattccttcttctcccgagagacgctgtacccttcagctatatctcctttctgaaagtcatttactatctgtgagtagtagatcaatctcagcccttgccctgggtcctgtcggtaccagtacatggcatcgtggttcaaattctgttcacaactcagggtcacattctgtccttcctttctgaacaggtactttggggactgagtgattccaccatccacggtgtctggaaaagaatcaagcctatatgctgctgagcgggctggcaaggc

SEQ ID NO: 703 - DNA, 495 bp, Artificial Sequence
  source: /note="Description of Artificial Sequence: Synthetic polynucleotide"
gcctccctcgcgccatcagagagtgtcaatcctgcctgtggacccacttttccctgtgacggatctgcaaaagaacctgaaaaatgtcttacctacaactgtgagtctggtgccttgtccaaagaaagcttcagtgtcgacagagtgtcaatcctgctcagcactgcagatgtagaagctgctgtcttcaggatgggcactggtcactgtcagagtggacaaggtcaggcttgcatggttgatgagaaacttgtccttctcgacgccttgctcgtatgtggccttggagccctcattggaagttgccatcagcatgagactctgtttcgggaactgacgataccaaaacatagttgtggcctgaaagtccagggaacggcactcgatcttcacagaggttccactcttacagataacccagctcggatgttgagagacgacagcaccaagcccggagcctagagtgtcaatcctgcctgagcgggctggcaaggc

SEQ ID NO: 704 - DNA, 495 bp, Artificial Sequence
  source: /note="Description of Artificial Sequence: Synthetic polynucleotide"
gcctccctcgcgccatcaggttccgaaaatcctgcatttcccaggacagagtcctccctcatcgcacccctcctagagacccccagccttacctacaacggttaacctggtccccgaaccgaaggtgtagccatagtcgacgttccgaaaatcctgctcagcactgcagatgtagaagctgctgtcttcaggatgggcactggtcactgtcagagtggacaaggtcaggcttgcatggttgatgagaaacttgtccttctcgacgccttgctcgtatgtggccttggagccctcattggaagttgccatcagcatgagactctgtttcgggaactgacgataccaaaacatagttgtggcctgaaagtccagggaacggcactcgatcttcacagaggttccactcttacagataacccagctcggatgttgagagacgacagcaccaagcccggagcctgttccgaaaatcctgcctgagcgggctggcaaggc

SEQ ID NO: 705 - DNA, 495 bp, Artificial Sequence
  source: /note="Description of Artificial Sequence: Synthetic polynucleotide"
gcctccctcgcgccatcagcgttacttaatcctgcctggattccagcccctttttgcaagttcccagctgtccagccttgacttactcacctacaacagtgagccaacttccctctccaaaatatatggtgtttcgtcgaccgttacttaatcctgctcagcactgcagatgtagaagctgctgtcttcaggatgggcactggtcactgtcagagtggacaaggtcaggcttgcatggttgatgagaaacttgtccttctcgacgccttgctcgtatgtggccttggagccctcattggaagttgccatcagcatgagactctgtttcgggaactgacgataccaaaacatagttgtggcctgaaagtccagggaacggcactcgatcttcacagaggttccactcttacagataacccagctcggatgttgagagacgacagcaccaagcccggagcctcgttacttaatcctgcctgagcgggctggcaaggc

SEQ ID NO: 706 - DNA, 495 bp, Artificial Sequence
  source: /note="Description of Artificial Sequence: Synthetic polynucleotide"
gcctccctcgcgccatcagtaggagacaatcctgcctcctggaactccgaccttatgatacactatcccgaaagaagtcttttacatacccaagacagagagctgggttccactgccaaaaaacagtttttcattgtcgactaggagacaatcctgctcagcactgcagatgtagaagctgctgtcttcaggatgggcactggtcactgtcagagtggacaaggtcaggcttgcatggttgatgagaaacttgtccttctcgacgccttgctcgtatgtggccttggagccctcattggaagttgccatcagcatgagactctgtttcgggaactgacgataccaaaacatagttgtggcctgaaagtccagggaacggcactcgatcttcacagaggttccactcttacagataacccagctcggatgttgagagacgacagcaccaagcccggagccttaggagacaatcctgcctgagcgggctggcaaggc

SEQ ID NO: 707 - DNA, 495 bp, Artificial Sequence
  source: /note="Description of Artificial Sequence: Synthetic polynucleotide"
gcctccctcgcgccatcaggacactctaatcctgcagagaactctgccttcaagggacaatggccataccaccctgattctgcaacttacctaggatggagagtcgagtcccatcaccaaaatgctggggctgatgtcgacgacactctaatcctgctcagcactgcagatgtagaagctgctgtcttcaggatgggcactggtcactgtcagagtggacaaggtcaggcttgcatggttgatgagaaacttgtccttctcgacgccttgctcgtatgtggccttggagccctcattggaagttgccatcagcatgagactctgtttcgggaactgacgataccaaaacatagttgtggcctgaaagtccagggaacggcactcgatcttcacagaggttccactcttacagataacccagctcggatgttgagagacgacagcaccaagcccggagcctgacactctaatcctgcctgagcgggctggcaaggc

SEQ ID NO: 708 - DNA, 495 bp, Artificial Sequence
  source: /note="Description of Artificial Sequence: Synthetic polynucleotide"
gcctccctcgcgccatcagttcggaacaatcctgcatcattgcagtcaaacccaggcacccccgagtcaagagtggagcccccatacctgtcacagtgagcctggtcccgttcccaaagtggaggggtgaattatgtcgacttcggaacaatcctgctcagcactgcagatgtagaagctgctgtcttcaggatgggcactggtcactgtcagagtggacaaggtcaggcttgcatggttgatgagaaacttgtccttctcgacgccttgctcgtatgtggccttggagccctcattggaagttgccatcagcatgagactctgtttcgggaactgacgataccaaaacatagttgtggcctgaaagtccagggaacggcactcgatcttcacagaggttccactcttacagataacccagctcggatgttgagagacgacagcaccaagcccggagcctttcggaacaatcctgcctgagcgggctggcaaggc

SEQ ID NO: 709 - DNA, 495 bp, Artificial Sequence
  source: /note="Description of Artificial Sequence: Synthetic polynucleotide"
gcctccctcgcgccatcagaagtaacgaatcctgcgggtcgtgcaggctgggctgctcaccctctctcccacctggagcccccttcttacctagcacggtgagccgtgtccctggcccgaagaactgctcattgtgtcgacaagtaacgaatcctgctcagcactgcagatgtagaagctgctgtcttcaggatgggcactggtcactgtcagagtggacaaggtcaggcttgcatggttgatgagaaacttgtccttctcgacgccttgctcgtatgtggccttggagccctcattggaagttgccatcagcatgagactctgtttcgggaactgacgataccaaaacatagttgtggcctgaaagtccagggaacggcactcgatcttcacagaggttccactcttacagataacccagctcggatgttgagagacgacagcaccaagcccggagcctaagtaacgaatcctgcctgagcgggctggcaaggc

SEQ ID NO: 710 - DNA, 495 bp, Artificial Sequence
  source: /note="Description of Artificial Sequence: Synthetic polynucleotide"
gcctccctcgcgccatcaggtctcctaaatcctgccctctgcccatcccgccctctcggagctctccggagccccaaccgcctccttacccagtacggtcagcctagagccttctccaaaaaacagctccccggtgtcgacgtctcctaaatcctgctcagcactgcagatgtagaagctgctgtcttcaggatgggcactggtcactgtcagagtggacaaggtcaggcttgcatggttgatgagaaacttgtccttctcgacgccttgctcgtatgtggccttggagccctcattggaagttgccatcagcatgagactctgtttcgggaactgacgataccaaaacatagttgtggcctgaaagtccagggaacggcactcgatcttcacagaggttccactcttacagataacccagctcggatgttgagagacgacagcaccaagcccggagcctgtctcctaaatcctgcctgagcgggctggcaaggc

SEQ ID NO: 711 - DNA, 495 bp, Artificial Sequence
  source: /note="Description of Artificial Sequence: Synthetic polynucleotide"
gcctccctcgcgccatcaggtagacacaatcctgcgcgtcccggggcgccccctccccagttccggggcttcagcgggagcccccgcttaccgagcactgtcagccgggtgcctgggccaaaatactgcgtatctgtcgacgtagacacaatcctgctcagcactgcagatgtagaagctgctgtcttcaggatgggcactggtcactgtcagagtggacaaggtcaggcttgcatggttgatgagaaacttgtccttctcgacgccttgctcgtatgtggccttggagccctcattggaagttgccatcagcatgagactctgtttcgggaactgacgataccaaaacatagttgtggcctgaaagtccagggaacggcactcgatcttcacagaggttccactcttacagataacccagctcggatgttgagagacgacagcaccaagcccggagcctgtagacacaatcctgcctgagcgggctggcaaggc

SEQ ID NO: 712 - DNA, 495 bp, Artificial Sequence
  source: /note="Description of Artificial Sequence: Synthetic polynucleotide"
gcctccctcgcgccatcagcactgtacaatcctgccgcacaaaaacccgagcgcagtctcgtccccggtcccccggcggccccagcttacccagcactgagagccgggtcccggcgccgaagtactgaatgttttgtcgaccactgtacaatcctgctcagcactgcagatgtagaagctgctgtcttcaggatgggcactggtcactgtcagagtggacaaggtcaggcttgcatggttgatgagaaacttgtccttctcgacgccttgctcgtatgtggccttggagccctcattggaagttgccatcagcatgagactctgtttcgggaactgacgataccaaaacatagttgtggcctgaaagtccagggaacggcactcgatcttcacagaggttccactcttacagataacccagctcggatgttgagagacgacagcaccaagcccggagcctcactgtacaatcctgcctgagcgggctggcaaggc

SEQ ID NO: 713 - DNA, 495 bp, Artificial Sequence
  source: /note="Description of Artificial Sequence: Synthetic polynucleotide"
gcctccctcgcgccatcaggatgatccaatcctgcccccgcaaaaaccagacccaagccgcccgcgcccgcgccccagcagcccgcgctcaccgagcaccaggagccgcgtgcctggcccgaagtactgggtctcgtcgacgatgatccaatcctgctcagcactgcagatgtagaagctgctgtcttcaggatgggcactggtcactgtcagagtggacaaggtcaggcttgcatggttgatgagaaacttgtccttctcgacgccttgctcgtatgtggccttggagccctcattggaagttgccatcagcatgagactctgtttcgggaactgacgataccaaaacatagttgtggcctgaaagtccagggaacggcactcgatcttcacagaggttccactcttacagataacccagctcggatgttgagagacgacagcaccaagcccggagcctgatgatccaatcctgcctgagcgggctggcaaggc

SEQ ID NO: 714 - DNA, 495 bp, Artificial Sequence
  source: /note="Description of Artificial Sequence: Synthetic polynucleotide"
gcctccctcgcgccatcagcgccaataaatcctgcccgccgccttccacctgaatcccgccgcccgggtggtcccgcgaaaactcacccagcacggtcagcctgctgccggccccgaaagtcaggacgttggcccgtcgaccgccaataaatcctgctcagcactgcagatgtagaagctgctgtcttcaggatgggcactggtcactgtcagagtggacaaggtcaggcttgcatggttgatgagaaacttgtccttctcgacgccttgctcgtatgtggccttggagccctcattggaagttgccatcagcatgagactctgtttcgggaactgacgataccaaaacatagttgtggcctgaaagtccagggaacggcactcgatcttcacagaggttccactcttacagataacccagctcggatgttgagagacgacagcaccaagcccggagcctcgccaataaatcctgcctgagcgggctggcaaggc

SEQ ID NO: 715 - DNA, 495 bp, Artificial Sequence
  source: /note="Description of Artificial Sequence: Synthetic polynucleotide"
gcctccctcgcgccatcagtcaagcctaatcctgcccaccctccgactccggggaccgaggggctggaaggtggggagacgcccgaatctcacctgtgaccgtgagcctggtgcccggcccgaagtactgctcgtgtcgactcaagcctaatcctgctcagcactgcagatgtagaagctgctgtcttcaggatgggcactggtcactgtcagagtggacaaggtcaggcttgcatggttgatgagaaacttgtccttctcgacgccttgctcgtatgtggccttggagccctcattggaagttgccatcagcatgagactctgtttcgggaactgacgataccaaaacatagttgtggcctgaaagtccagggaacggcactcgatcttcacagaggttccactcttacagataacccagctcggatgttgagagacgacagcaccaagcccggagccttcaagcctaatcctgcctgagcgggctggcaaggc

SEQ ID NO: 716 - DNA, 495 bp, Artificial Sequence
  source: /note="Description of Artificial Sequence: Synthetic polynucleotide"
gcctccctcgcgccatcagagagtgtctgagacctctgtggacccacttttccctgtgacggatctgcaaaagaacctgaaaaatgtcttacctacaactgtgagtctggtgccttgtccaaagaaagcttcagtgtcgacagagtgtctgagaccttcactgctggcacagaaatacagtgctgtgtcccctgactccgtggactggatctccaaggtacaggatgagtttttggagcattgggctaaaaatcgctcattgattatttctgctttctgaataagttcttcattctgaaagtaaaccaaaaacttgagctcttcttccagcttcttacgataccagtaaacataactatgtgcttttataggaacacaatccatctttgctttctgttcacttgctttgaccagaagtctaggtctctgggtgaccttggtgtccgtggagcctgtggagagagtgtctgagacctctgagcgggctggcaaggc

SEQ ID NO: 717 - DNA, 495 bp, Artificial Sequence
  source: /note="Description of Artificial Sequence: Synthetic polynucleotide"
gcctccctcgcgccatcaggttccgaatgagacctatttcccaggacagagtcctccctcatcgcacccctcctagagacccccagccttacctacaacggttaacctggtccccgaaccgaaggtgtagccatagtcgacgttccgaatgagaccttcactgctggcacagaaatacagtgctgtgtcccctgactccgtggactggatctccaaggtacaggatgagtttttggagcattgggctaaaaatcgctcattgattatttctgctttctgaataagttcttcattctgaaagtaaaccaaaaacttgagctcttcttccagcttcttacgataccagtaaacataactatgtgcttttataggaacacaatccatctttgctttctgttcacttgctttgaccagaagtctaggtctctgggtgaccttggtgtccgtggagcctgtggaggttccgaatgagacctctgagcgggctggcaaggc

SEQ ID NO: 718 - DNA, 495 bp, Artificial Sequence
  source: /note="Description of Artificial Sequence: Synthetic polynucleotide"
gcctccctcgcgccatcagcgttactttgagacctctggattccagcccctttttgcaagttcccagctgtccagccttgacttactcacctacaacagtgagccaacttccctctccaaaatatatggtgtttcgtcgaccgttactttgagaccttcactgctggcacagaaatacagtgctgtgtcccctgactccgtggactggatctccaaggtacaggatgagtttttggagcattgggctaaaaatcgctcattgattatttctgctttctgaataagttcttcattctgaaagtaaaccaaaaacttgagctcttcttccagcttcttacgataccagtaaacataactatgtgcttttataggaacacaatccatctttgctttctgttcacttgctttgaccagaagtctaggtctctgggtgaccttggtgtccgtggagcctgtggagcgttactttgagacctctgagcgggctggcaaggc

SEQ ID NO: 719 - DNA, 495 bp, Artificial Sequence
  source: /note="Description of Artificial Sequence: Synthetic polynucleotide"
gcctccctcgcgccatcagtaggagactgagacctctcctggaactccgaccttatgatacactatcccgaaagaagtcttttacatacccaagacagagagctgggttccactgccaaaaaacagtttttcattgtcgactaggagactgagaccttcactgctggcacagaaatacagtgctgtgtcccctgactccgtggactggatctccaaggtacaggatgagtttttggagcattgggctaaaaatcgctcattgattatttctgctttctgaataagttcttcattctgaaagtaaaccaaaaacttgagctcttcttccagcttcttacgataccagtaaacataactatgtgcttttataggaacacaatccatctttgctttctgttcacttgctttgaccagaagtctaggtctctgggtgaccttggtgtccgtggagcctgtggagtaggagactgagacctctgagcgggctggcaaggc

SEQ ID NO: 720 - DNA, 495 bp, Artificial Sequence
  source: /note="Description of Artificial Sequence: Synthetic polynucleotide"
gcctccctcgcgccatcaggacactcttgagacctagagaactctgccttcaagggacaatggccataccaccctgattctgcaacttacctaggatggagagtcgagtcccatcaccaaaatgctggggctgatgtcgacgacactcttgagaccttcactgctggcacagaaatacagtgctgtgtcccctgactccgtggactggatctccaaggtacaggatgagtttttggagcattgggctaaaaatcgctcattgattatttctgctttctgaataagttcttcattctgaaagtaaaccaaaaacttgagctcttcttccagcttcttacgataccagtaaacataactatgtgcttttataggaacacaatccatctttgctttctgttcacttgctttgaccagaagtctaggtctctgggtgaccttggtgtccgtggagcctgtggaggacactcttgagacctctgagcgggctggcaaggc

SEQ ID NO: 721 - DNA, 495 bp, Artificial Sequence
  source: /note="Description of Artificial Sequence: Synthetic polynucleotide"
gcctccctcgcgccatcagttcggaactgagacctatcattgcagtcaaacccaggcacccccgagtcaagagtggagcccccatacctgtcacagtgagcctggtcccgttcccaaagtggaggggtgaattatgtcgacttcggaactgagaccttcactgctggcacagaaatacagtgctgtgtcccctgactccgtggactggatctccaaggtacaggatgagtttttggagcattgggctaaaaatcgctcattgattatttctgctttctgaataagttcttcattctgaaagtaaaccaaaaacttgagctcttcttccagcttcttacgataccagtaaacataactatgtgcttttataggaacacaatccatctttgctttctgttcacttgctttgaccagaagtctaggtctctgggtgaccttggtgtccgtggagcctgtggagttcggaactgagacctctgagcgggctggcaaggc

SEQ ID NO: 722 - DNA, 495 bp, Artificial Sequence
  source: /note="Description of Artificial Sequence: Synthetic polynucleotide"
gcctccctcgcgccatcagaagtaacgtgagacctgggtcgtgcaggctgggctgctcaccctctctcccacctggagcccccttcttacctagcacggtgagccgtgtccctggcccgaagaactgctcattgtgtcgacaagtaacgtgagaccttcactgctggcacagaaatacagtgctgtgtcccctgactccgtggactggatctccaaggtacaggatgagtttttggagcattgggctaaaaatcgctcattgattatttctgctttctgaataagttcttcattctgaaagtaaaccaaaaacttgagctcttcttccagcttcttacgataccagtaaacataactatgtgcttttataggaacacaatccatctttgctttctgttcacttgctttgaccagaagtctaggtctctgggtgaccttggtgtccgtggagcctgtggagaagtaacgtgagacctctgagcgggctggcaaggc

SEQ ID NO: 723 - DNA, 495 bp, Artificial Sequence
  source: /note="Description of Artificial Sequence: Synthetic polynucleotide"
gcctccctcgcgccatcaggtctcctatgagacctcctctgcccatcccgccctctcggagctctccggagccccaaccgcctccttacccagtacggtcagcctagagccttctccaaaaaacagctccccggtgtcgacgtctcctatgagaccttcactgctggcacagaaatacagtgctgtgtcccctgactccgtggactggatctccaaggtacaggatgagtttttggagcattgggctaaaaatcgctcattgattatttctgctttctgaataagttcttcattctgaaagtaaaccaaaaacttgagctcttcttccagcttcttacgataccagtaaacataactatgtgcttttataggaacacaatccatctttgctttctgttcacttgctttgaccagaagtctaggtctctgggtgaccttggtgtccgtggagcctgtggaggtctcctatgagacctctgagcgggctggcaaggc

SEQ ID NO: 724 - DNA, 495 bp, Artificial Sequence
  source: /note="Description of Artificial Sequence: Synthetic polynucleotide"
gcctccctcgcgccatcaggtagacactgagacctgcgtcccggggcgccccctccccagttccggggcttcagcgggagcccccgcttaccgagcactgtcagccgggtgcctgggccaaaatactgcgtatctgtcgacgtagacactgagaccttcactgctggcacagaaatacagtgctgtgtcccctgactccgtggactggatctccaaggtacaggatgagtttttggagcattgggctaaaaatcgctcattgattatttctgctttctgaataagttcttcattctgaaagtaaaccaaaaacttgagctcttcttccagcttcttacgataccagtaaacataactatgtgcttttataggaacacaatccatctttgctttctgttcacttgctttgaccagaagtctaggtctctgggtgaccttggtgtccgtggagcctgtggaggtagacactgagacctctgagcgggctggcaaggc

SEQ ID NO: 725 - DNA, 495 bp, Artificial Sequence
  source: /note="Description of Artificial Sequence: Synthetic polynucleotide"
gcctccctcgcgccatcagcactgtactgagacctcgcacaaaaacccgagcgcagtctcgtccccggtcccccggcggccccagcttacccagcactgagagccgggtcccggcgccgaagtactgaatgttttgtcgaccactgtactgagaccttcactgctggcacagaaatacagtgctgtgtcccctgactccgtggactggatctccaaggtacaggatgagtttttggagcattgggctaaaaatcgctcattgattatttctgctttctgaataagttcttcattctgaaagtaaaccaaaaacttgagctcttcttccagcttcttacgataccagtaaacataactatgtgcttttataggaacacaatccatctttgctttctgttcacttgctttgaccagaagtctaggtctctgggtgaccttggtgtccgtggagcctgtggagcactgtactgagacctctgagcgggctggcaaggc

SEQ ID NO: 726 - DNA, 495 bp, Artificial Sequence
  source: /note="Description of Artificial Sequence: Synthetic polynucleotide"
gcctccctcgcgccatcaggatgatcctgagacctccccgcaaaaaccagacccaagccgcccgcgcccgcgccccagcagcccgcgctcaccgagcaccaggagccgcgtgcctggcccgaagtactgggtctcgtcgacgatgatcctgagaccttcactgctggcacagaaatacagtgctgtgtcccctgactccgtggactggatctccaaggtacaggatgagtttttggagcattgggctaaaaatcgctcattgattatttctgctttctgaataagttcttcattctgaaagtaaaccaaaaacttgagctcttcttccagcttcttacgataccagtaaacataactatgtgcttttataggaacacaatccatctttgctttctgttcacttgctttgaccagaagtctaggtctctgggtgaccttggtgtccgtggagcctgtggaggatgatcctgagacctctgagcgggctggcaaggc

SEQ ID NO: 727 - DNA, 495 bp, Artificial Sequence
  source: /note="Description of Artificial Sequence: Synthetic polynucleotide"
gcctccctcgcgccatcagcgccaatatgagacctccgccgccttccacctgaatcccgccgcccgggtggtcccgcgaaaactcacccagcacggtcagcctgctgccggccccgaaagtcaggacgttggcccgtcgaccgccaatatgagaccttcactgctggcacagaaatacagtgctgtgtcccctgactccgtggactggatctccaaggtacaggatgagtttttggagcattgggctaaaaatcgctcattgattatttctgctttctgaataagttcttcattctgaaagtaaaccaaaaacttgagctcttcttccagcttcttacgataccagtaaacataactatgtgcttttataggaacacaatccatctttgctttctgttcacttgctttgaccagaagtctaggtctctgggtgaccttggtgtccgtggagcctgtggagcgccaatatgagacctctgagcgggctggcaaggc

SEQ ID NO: 728 - DNA, 495 bp, Artificial Sequence
  source: /note="Description of Artificial Sequence: Synthetic polynucleotide"
gcctccctcgcgccatcagtcaagccttgagacctccaccctccgactccggggaccgaggggctggaaggtggggagacgcccgaatctcacctgtgaccgtgagcctggtgcccggcccgaagtactgctcgtgtcgactcaagccttgagaccttcactgctggcacagaaatacagtgctgtgtcccctgactccgtggactggatctccaaggtacaggatgagtttttggagcattgggctaaaaatcgctcattgattatttctgctttctgaataagttcttcattctgaaagtaaaccaaaaacttgagctcttcttccagcttcttacgataccagtaaacataactatgtgcttttataggaacacaatccatctttgctttctgttcacttgctttgaccagaagtctaggtctctgggtgaccttggtgtccgtggagcctgtggagtcaagccttgagacctctgagcgggctggcaaggc

SEQ ID NO: 729 - DNA, 495 bp, Artificial Sequence
  source: /note="Description of Artificial Sequence: Synthetic polynucleotide"
gcctccctcgcgccatcagagagtgtcgaatggacctgtggacccacttttccctgtgacggatctgcaaaagaacctgaaaaatgtcttacctacaactgtgagtctggtgccttgtccaaagaaagcttcagtgtcgacagagtgtcgaatggactcatcccaggacagaagtacaaagctgtttggctggtgtgggccaacttcaccctgagaagaaatagccccttctcctcttggcagacacgtagccttcagttagatctcctctctgaatatccttttcaacccttgagtaatagatcagtctcagattttgctttgggtcctgccagtaccagtagcagtacatgtcattgtgtctcaaattccgtttccactccagagtcacatcccatccagccccagtgagctggaatggcatctgatagatgtcagcatccaagggtccaagagacaaagagtgtcgaatggacctgagcgggctggcaaggc

SEQ ID NO: 730 - DNA, 495 bp, Artificial Sequence
  source: /note="Description of Artificial Sequence: Synthetic polynucleotide"
gcctccctcgcgccatcaggttccgaagaatggacatttcccaggacagagtcctccctcatcgcacccctcctagagacccccagccttacctacaacggttaacctggtccccgaaccgaaggtgtagccatagtcgacgttccgaagaatggactcatcccaggacagaagtacaaagctgtttggctggtgtgggccaacttcaccctgagaagaaatagccccttctcctcttggcagacacgtagccttcagttagatctcctctctgaatatccttttcaacccttgagtaatagatcagtctcagattttgctttgggtcctgccagtaccagtagcagtacatgtcattgtgtctcaaattccgtttccactccagagtcacatcccatccagccccagtgagctggaatggcatctgatagatgtcagcatccaagggtccaagagacaagttccgaagaatggacctgagcgggctggcaaggc

SEQ ID NO: 731 - DNA, 495 bp, Artificial Sequence
  source: /note="Description of Artificial Sequence: Synthetic polynucleotide"
gcctccctcgcgccatcagcgttacttgaatggacctggattccagcccctttttgcaagttcccagctgtccagccttgacttactcacctacaacagtgagccaacttccctctccaaaatatatggtgtttcgtcgaccgttacttgaatggactcatcccaggacagaagtacaaagctgtttggctggtgtgggccaacttcaccctgagaagaaatagccccttctcctcttggcagacacgtagccttcagttagatctcctctctgaatatccttttcaacccttgagtaatagatcagtctcagattttgctttgggtcctgccagtaccagtagcagtacatgtcattgtgtctcaaattccgtttccactccagagtcacatcccatccagccccagtgagctggaatggcatctgatagatgtcagcatccaagggtccaagagacaacgttacttgaatggacctgagcgggctggcaaggc

SEQ ID NO: 732 - DNA, 495 bp, Artificial Sequence
  source: /note="Description of Artificial Sequence: Synthetic polynucleotide"
gcctccctcgcgccatcagtaggagacgaatggacctcctggaactccgaccttatgatacactatcccgaaagaagtcttttacatacccaagacagagagctgggttccactgccaaaaaacagtttttcattgtcgactaggagacgaatggactcatcccaggacagaagtacaaagctgtttggctggtgtgggccaacttcaccctgagaagaaatagccccttctcctcttggcagacacgtagccttcagttagatctcctctctgaatatccttttcaacccttgagtaatagatcagtctcagattttgctttgggtcctgccagtaccagtagcagtacatgtcattgtgtctcaaattccgtttccactccagagtcacatcccatccagccccagtgagctggaatggcatctgatagatgtcagcatccaagggtccaagagacaataggagacgaatggacctgagcgggctggcaaggc

SEQ ID NO: 733 - DNA, 495 bp, Artificial Sequence
  source: /note="Description of Artificial Sequence: Synthetic polynucleotide"
gcctccctcgcgccatcaggacactctgaatggacagagaactctgccttcaagggacaatggccataccaccctgattctgcaacttacctaggatggagagtcgagtcccatcaccaaaatgctggggctgatgtcgacgacactctgaatggactcatcccaggacagaagtacaaagctgtttggctggtgtgggccaacttcaccctgagaagaaatagccccttctcctcttggcagacacgtagccttcagttagatctcctctctgaatatccttttcaacccttgagtaatagatcagtctcagattttgctttgggtcctgccagtaccagtagcagtacatgtcattgtgtctcaaattccgtttccactccagagtcacatcccatccagccccagtgagctggaatggcatctgatagatgtcagcatccaagggtccaagagacaagacactctgaatggacctgagcgggctggcaaggc

SEQ ID NO: 734 - DNA, 495 bp, Artificial Sequence
  source: /note="Description of Artificial Sequence: Synthetic polynucleotide"
gcctccctcgcgccatcagttcggaacgaatggacatcattgcagtcaaacccaggcacccccgagtcaagagtggagcccccatacctgtcacagtgagcctggtcccgttcccaaagtggaggggtgaattatgtcgacttcggaacgaatggactcatcccaggacagaagtacaaagctgtttggctggtgtgggccaacttcaccctgagaagaaatagccccttctcctcttggcagacacgtagccttcagttagatctcctctctgaatatccttttcaacccttgagtaatagatcagtctcagattttgctttgggtcctgccagtaccagtagcagtacatgtcattgtgtctcaaattccgtttccactccagagtcacatcccatccagccccagtgagctggaatggcatctgatagatgtcagcatccaagggtccaagagacaattcggaacgaatggacctgagcgggctggcaaggc

SEQ ID NO: 735 - DNA, 495 bp, Artificial Sequence
  source: /note="Description of Artificial Sequence: Synthetic polynucleotide"
gcctccctcgcgccatcagaagtaacggaatggacgggtcgtgcaggctgggctgctcaccctctctcccacctggagcccccttcttacctagcacggtgagccgtgtccctggcccgaagaactgctcattgtgtcgacaagtaacggaatggactcatcccaggacagaagtacaaagctgtttggctggtgtgggccaacttcaccctgagaagaaatagccccttctcctcttggcagacacgtagccttcagttagatctcctctctgaatatccttttcaacccttgagtaatagatcagtctcagattttgctttgggtcctgccagtaccagtagcagtacatgtcattgtgtctcaaattccgtttccactccagagtcacatcccatccagccccagtgagctggaatggcatctgatagatgtcagcatccaagggtccaagagacaaaagtaacggaatggacctgagcgggctggcaaggc

SEQ ID NO: 736 - DNA, 495 bp, Artificial Sequence
  source: /note="Description of Artificial Sequence: Synthetic polynucleotide"
gcctccctcgcgccatcaggtctcctagaatggaccctctgcccatcccgccctctcggagctctccggagccccaaccgcctccttacccagtacggtcagcctagagccttctccaaaaaacagctccccggtgtcgacgtctcctagaatggactcatcccaggacagaagtacaaagctgtttggctggtgtgggccaacttcaccctgagaagaaatagccccttctcctcttggcagacacgtagccttcagttagatctcctctctgaatatccttttcaacccttgagtaatagatcagtctcagattttgctttgggtcctgccagtaccagtagcagtacatgtcattgtgtctcaaattccgtttccactccagagtcacatcccatccagccccagtgagctggaatggcatctgatagatgtcagcatccaagggtccaagagacaagtctcctagaatggacctgagcgggctggcaaggc

SEQ ID NO: 737 - DNA, 495 bp, Artificial Sequence
  source: /note="Description of Artificial Sequence: Synthetic polynucleotide"
gcctccctcgcgccatcaggtagacacgaatggacgcgtcccggggcgccccctccccagttccggggcttcagcgggagcccccgcttaccgagcactgtcagccgggtgcctgggccaaaatactgcgtatctgtcgacgtagacacgaatggactcatcccaggacagaagtacaaagctgtttggctggtgtgggccaacttcaccctgagaagaaatagccccttctcctcttggcagacacgtagccttcagttagatctcctctctgaatatccttttcaacccttgagtaatagatcagtctcagattttgctttgggtcctgccagtaccagtagcagtacatgtcattgtgtctcaaattccgtttccactccagagtcacatcccatccagccccagtgagctggaatggcatctgatagatgtcagcatccaagggtccaagagacaagtagacacgaatggacctgagcgggctggcaaggc

SEQ ID NO: 738 - DNA, 495 bp, Artificial Sequence
  source: /note="Description of Artificial Sequence: Synthetic polynucleotide"
gcctccctcgcgccatcagcactgtacgaatggaccgcacaaaaacccgagcgcagtctcgtccccggtcccccggcggccccagcttacccagcactgagagccgggtcccggcgccgaagtactgaatgttttgtcgaccactgtacgaatggactcatcccaggacagaagtacaaagctgtttggctggtgtgggccaacttcaccctgagaagaaatagccccttctcctcttggcagacacgtagccttcagttagatctcctctctgaatatccttttcaacccttgagtaatagatcagtctcagattttgctttgggtcctgccagtaccagtagcagtacatgtcattgtgtctcaaattccgtttccactccagagtcacatcccatccagccccagtgagctggaatggcatctgatagatgtcagcatccaagggtccaagagacaacactgtacgaatggacctgagcgggctggcaaggc

SEQ ID NO: 739 - DNA, 495 bp, Artificial Sequence
  source: /note="Description of Artificial Sequence: Synthetic polynucleotide"
gcctccctcgcgccatcaggatgatccgaatggacccccgcaaaaaccagacccaagccgcccgcgcccgcgccccagcagcccgcgctcaccgagcaccaggagccgcgtgcctggcccgaagtactgggtctcgtcgacgatgatccgaatggactcatcccaggacagaagtacaaagctgtttggctggtgtgggccaacttcaccctgagaagaaatagccccttctcctcttggcagacacgtagccttcagttagatctcctctctgaatatccttttcaacccttgagtaatagatcagtctcagattttgctttgggtcctgccagtaccagtagcagtacatgtcattgtgtctcaaattccgtttccactccagagtcacatcccatccagccccagtgagctggaatggcatctgatagatgtcagcatccaagggtccaagagacaagatgatccgaatggacctgagcgggctggcaaggc

SEQ ID NO: 740 - DNA, 495 bp, Artificial Sequence
  source: /note="Description of Artificial Sequence: Synthetic polynucleotide"
gcctccctcgcgccatcagcgccaatagaatggacccgccgccttccacctgaatcccgccgcccgggtggtcccgcgaaaactcacccagcacggtcagcctgctgccggccccgaaagtcaggacgttggcccgtcgaccgccaatagaatggactcatcccaggacagaagtacaaagctgtttggctggtgtgggccaacttcaccctgagaagaaatagccccttctcctcttggcagacacgtagccttcagttagatctcctctctgaatatccttttcaacccttgagtaatagatcagtctcagattttgctttgggtcctgccagtaccagtagcagtacatgtcattgtgtctcaaattccgtttccactccagagtcacatcccatccagccccagtgagctggaatggcatctgatagatgtcagcatccaagggtccaagagacaacgccaatagaatggacctgagcgggctggcaaggc

SEQ ID NO: 741 - DNA, 495 bp, Artificial Sequence
  source: /note="Description of Artificial Sequence: Synthetic polynucleotide"
gcctccctcgcgccatcagtcaagcctgaatggacccaccctccgactccggggaccgaggggctggaaggtggggagacgcccgaatctcacctgtgaccgtgagcctggtgcccggcccgaagtactgctcgtgtcgactcaagcctgaatggactcatcccaggacagaagtacaaagctgtttggctggtgtgggccaacttcaccctgagaagaaatagccccttctcctcttggcagacacgtagccttcagttagatctcctctctgaatatccttttcaacccttgagtaatagatcagtctcagattttgctttgggtcctgccagtaccagtagcagtacatgtcattgtgtctcaaattccgtttccactccagagtcacatcccatccagccccagtgagctggaatggcatctgatagatgtcagcatccaagggtccaagagacaatcaagcctgaatggacctgagcgggctggcaaggc

SEQ ID NO: 742 - DNA, 495 bp, Artificial Sequence
  source: /note="Description of Artificial Sequence: Synthetic polynucleotide"
gcctccctcgcgccatcagagagtgtcgtcatagtctgtggacccacttttccctgtgacggatctgcaaaagaacctgaaaaatgtcttacctacaactgtgagtctggtgccttgtccaaagaaagcttcagtgtcgacagagtgtcgtcatagttcactgctggcgcagagatacagtgccgtgtctcccggttctgaggacaggattgccaggctgcagggtgcgttcttggggcattgagatgagaatcgcttcttgtgcatctccgtttcttgaagaacttgttcattctgaaaggaaatcaaaagcataaactctttattctgattctgttgataccaataaacaaaagtatgtcctttttcgggggtacaatccatctttgttttctgtccttttcctttgaccaaatgtcctggagtctgtgtgactttggcatgaaaagagtctgtaagaagagtgtcgtcatagtctgagcgggctggcaaggc

SEQ ID NO: 743 - DNA, 495 bp, Artificial Sequence
  source: /note="Description of Artificial Sequence: Synthetic polynucleotide"
gcctccctcgcgccatcaggttccgaagtcatagtatttcccaggacagagtcctccctcatcgcacccctcctagagacccccagccttacctacaacggttaacctggtccccgaaccgaaggtgtagccatagtcgacgttccgaagtcatagttcactgctggcgcagagatacagtgccgtgtctcccggttctgaggacaggattgccaggctgcagggtgcgttcttggggcattgagatgagaatcgcttcttgtgcatctccgtttcttgaagaacttgttcattctgaaaggaaatcaaaagcataaactctttattctgattctgttgataccaataaacaaaagtatgtcctttttcgggggtacaatccatctttgttttctgtccttttcctttgaccaaatgtcctggagtctgtgtgactttggcatgaaaagagtctgtaagagttccgaagtcatagtctgagcgggctggcaaggc

SEQ ID NO: 744 - DNA, 495 bp, Artificial Sequence
  source: /note="Description of Artificial Sequence: Synthetic polynucleotide"
gcctccctcgcgccatcagcgttacttgtcatagtctggattccagcccctttttgcaagttcccagctgtccagccttgacttactcacctacaacagtgagccaacttccctctccaaaatatatggtgtttcgtcgaccgttacttgtcatagttcactgctggcgcagagatacagtgccgtgtctcccggttctgaggacaggattgccaggctgcagggtgcgttcttggggcattgagatgagaatcgcttcttgtgcatctccgtttcttgaagaacttgttcattctgaaaggaaatcaaaagcataaactctttattctgattctgttgataccaataaacaaaagtatgtcctttttcgggggtacaatccatctttgttttctgtccttttcctttgaccaaatgtcctggagtctgtgtgactttggcatgaaaagagtctgtaagacgttacttgtcatagtctgagcgggctggcaaggc

SEQ ID NO: 745 - DNA, 495 bp, Artificial Sequence
  source: /note="Description of Artificial Sequence: Synthetic polynucleotide"
gcctccctcgcgccatcagtaggagacgtcatagtctcctggaactccgaccttatgatacactatcccgaaagaagtcttttacatacccaagacagagagctgggttccactgccaaaaaacagtttttcattgtcgactaggagacgtcatagttcactgctggcgcagagatacagtgccgtgtctcccggttctgaggacaggattgccaggctgcagggtgcgttcttggggcattgagatgagaatcgcttcttgtgcatctccgtttcttgaagaacttgttcattctgaaaggaaatcaaaagcataaactctttattctgattctgttgataccaataaacaaaagtatgtcctttttcgggggtacaatccatctttgttttctgtccttttcctttgaccaaatgtcctggagtctgtgtgactttggcatgaaaagagtctgtaagataggagacgtcatagtctgagcgggctggcaaggc

SEQ ID NO: 746 - DNA, 495 bp, Artificial Sequence
  source: /note="Description of Artificial Sequence: Synthetic polynucleotide"
gcctccctcgcgccatcaggacactctgtcatagtagagaactctgccttcaagggacaatggccataccaccctgattctgcaacttacctaggatggagagtcgagtcccatcaccaaaatgctggggctgatgtcgacgacactctgtcatagttcactgctggcgcagagatacagtgccgtgtctcccggttctgaggacaggattgccaggctgcagggtgcgttcttggggcattgagatgagaatcgcttcttgtgcatctccgtttcttgaagaacttgttcattctgaaaggaaatcaaaagcataaactctttattctgattctgttgataccaataaacaaaagtatgtcctttttcgggggtacaatccatctttgttttctgtccttttcctttgaccaaatgtcctggagtctgtgtgactttggcatgaaaagagtctgtaagagacactctgtcatagtctgagcgggctggcaaggc

SEQ ID NO: 747 - DNA, 495 bp, Artificial Sequence
  source: /note="Description of Artificial Sequence: Synthetic polynucleotide"
gcctccctcgcgccatcagttcggaacgtcatagtatcattgcagtcaaacccaggcacccccgagtcaagagtggagcccccatacctgtcacagtgagcctggtcccgttcccaaagtggaggggtgaattatgtcgacttcggaacgtcatagttcactgctggcgcagagatacagtgccgtgtctcccggttctgaggacaggattgccaggctgcagggtgcgttcttggggcattgagatgagaatcgcttcttgtgcatctccgtttcttgaagaacttgttcattctgaaaggaaatcaaaagcataaactctttattctgattctgttgataccaataaacaaaagtatgtcctttttcgggggtacaatccatctttgttttctgtccttttcctttgaccaaatgtcctggagtctgtgtgactttggcatgaaaagagtctgtaagattcggaacgtcatagtctgagcgggctggcaaggc

SEQ ID NO: 748 - DNA, 495 bp, Artificial Sequence
  source: /note="Description of Artificial Sequence: Synthetic polynucleotide"
gcctccctcgcgccatcagaagtaacggtcatagtgggtcgtgcaggctgggctgctcaccctctctcccacctggagcccccttcttacctagcacggtgagccgtgtccctggcccgaagaactgctcattgtgtcgacaagtaacggtcatagttcactgctggcgcagagatacagtgccgtgtctcccggttctgaggacaggattgccaggctgcagggtgcgttcttggggcattgagatgagaatcgcttcttgtgcatctccgtttcttgaagaacttgttcattctgaaaggaaatcaaaagcataaactctttattctgattctgttgataccaataaacaaaagtatgtcctttttcgggggtacaatccatctttgttttctgtccttttcctttgaccaaatgtcctggagtctgtgtgactttggcatgaaaagagtctgtaagaaagtaacggtcatagtctgagcgggctggcaaggc

SEQ ID NO: 749 - DNA, 495 bp, Artificial Sequence
  source: /note="Description of Artificial Sequence: Synthetic polynucleotide"
gcctccctcgcgccatcaggtctcctagtcatagtcctctgcccatcccgccctctcggagctctccggagccccaaccgcctccttacccagtacggtcagcctagagccttctccaaaaaacagctccccggtgtcgacgtctcctagtcatagttcactgctggcgcagagatacagtgccgtgtctcccggttctgaggacaggattgccaggctgcagggtgcgttcttggggcattgagatgagaatcgcttcttgtgcatctccgtttcttgaagaacttgttcattctgaaaggaaatcaaaagcataaactctttattctgattctgttgataccaataaacaaaagtatgtcctttttcgggggtacaatccatctttgttttctgtccttttcctttgaccaaatgtcctggagtctgtgtgactttggcatgaaaagagtctgtaagagtctcctagtcatagtctgagcgggctggcaaggc

SEQ ID NO: 750 - DNA, 495 bp, Artificial Sequence
  source: /note="Description of Artificial Sequence: Synthetic polynucleotide"
gcctccctcgcgccatcaggtagacacgtcatagtgcgtcccggggcgccccctccccagttccggggcttcagcgggagcccccgcttaccgagcactgtcagccgggtgcctgggccaaaatactgcgtatctgtcgacgtagacacgtcatagttcactgctggcgcagagatacagtgccgtgtctcccggttctgaggacaggattgccaggctgcagggtgcgttcttggggcattgagatgagaatcgcttcttgtgcatctccgtttcttgaagaacttgttcattctgaaaggaaatcaaaagcataaactctttattctgattctgttgataccaataaacaaaagtatgtcctttttcgggggtacaatccatctttgttttctgtccttttcctttgaccaaatgtcctggagtctgtgtgactttggcatgaaaagagtctgtaagagtagacacgtcatagtctgagcgggctggcaaggc

SEQ ID NO: 751 - DNA, 495 bp, Artificial Sequence
  source: /note="Description of Artificial Sequence: Synthetic polynucleotide"
gcctccctcgcgccatcagcactgtacgtcatagtcgcacaaaaacccgagcgcagtctcgtccccggtcccccggcggccccagcttacccagcactgagagccgggtcccggcgccgaagtactgaatgttttgtcgaccactgtacgtcatagttcactgctggcgcagagatacagtgccgtgtctcccggttctgaggacaggattgccaggctgcagggtgcgttcttggggcattgagatgagaatcgcttcttgtgcatctccgtttcttgaagaacttgttcattctgaaaggaaatcaaaagcataaactctttattctgattctgttgataccaataaacaaaagtatgtcctttttcgggggtacaatccatctttgttttctgtccttttcctttgaccaaatgtcctggagtctgtgtgactttggcatgaaaagagtctgtaagacactgtacgtcatagtctgagcgggctggcaaggc

SEQ ID NO: 752 - DNA, 495 bp, Artificial Sequence
  source: /note="Description of Artificial Sequence: Synthetic polynucleotide"
gcctccctcgcgccatcaggatgatccgtcatagtccccgcaaaaaccagacccaagccgcccgcgcccgcgccccagcagcccgcgctcaccgagcaccaggagccgcgtgcctggcccgaagtactgggtctcgtcgacgatgatccgtcatagttcactgctggcgcagagatacagtgccgtgtctcccggttctgaggacaggattgccaggctgcagggtgcgttcttggggcattgagatgagaatcgcttcttgtgcatctccgtttcttgaagaacttgttcattctgaaaggaaatcaaaagcataaactctttattctgattctgttgataccaataaacaaaagtatgtcctttttcgggggtacaatccatctttgttttctgtccttttcctttgaccaaatgtcctggagtctgtgtgactttggcatgaaaagagtctgtaagagatgatccgtcatagtctgagcgggctggcaaggc

SEQ ID NO: 753 - DNA, 495 bp, Artificial Sequence
  source: /note="Description of Artificial Sequence: Synthetic polynucleotide"
gcctccctcgcgccatcagcgccaatagtcatagtccgccgccttccacctgaatcccgccgcccgggtggtcccgcgaaaactcacccagcacggtcagcctgctgccggccccgaaagtcaggacgttggcccgtcgaccgccaatagtcatagttcactgctggcgcagagatacagtgccgtgtctcccggttctgaggacaggattgccaggctgcagggtgcgttcttggggcattgagatgagaatcgcttcttgtgcatctccgtttcttgaagaacttgttcattctgaaaggaaatcaaaagcataaactctttattctgattctgttgataccaataaacaaaagtatgtcctttttcgggggtacaatccatctttgttttctgtccttttcctttgaccaaatgtcctggagtctgtgtgactttggcatgaaaagagtctgtaagacgccaatagtcatagtctgagcgggctggcaaggc

SEQ ID NO: 754 - DNA, 495 bp, Artificial Sequence
  source: /note="Description of Artificial Sequence: Synthetic polynucleotide"
gcctccctcgcgccatcagtcaagcctgtcatagtccaccctccgactccggggaccgaggggctggaaggtggggagacgcccgaatctcacctgtgaccgtgagcctggtgcccggcccgaagtactgctcgtgtcgactcaagcctgtcatagttcactgctggcgcagagatacagtgccgtgtctcccggttctgaggacaggattgccaggctgcagggtgcgttcttggggcattgagatgagaatcgcttcttgtgcatctccgtttcttgaagaacttgttcattctgaaaggaaatcaaaagcataaactctttattctgattctgttgataccaataaacaaaagtatgtcctttttcgggggtacaatccatctttgttttctgtccttttcctttgaccaaatgtcctggagtctgtgtgactttggcatgaaaagagtctgtaagatcaagcctgtcatagtctgagcgggctggcaaggc

SEQ ID NO: 755 - DNA, 495 bp, Artificial Sequence
  source: /note="Description of Artificial Sequence: Synthetic polynucleotide"
gcctccctcgcgccatcagagagtgtccacatggactgtggacccacttttccctgtgacggatctgcaaaagaacctgaaaaatgtcttacctacaactgtgagtctggtgccttgtccaaagaaagcttcagtgtcgacagagtgtccacatggatcaactggtggcacagaagtaaagagctgtctggttggggatggcagactctagggacagggagaatttagcctgtgcctgtcgagagacactgtatccatcagagatctctcctttgtttatatctttgacatcaaaggagtaatagatcaaccgtaggcccagtcctgggtcttgtcgataccagtacattctatcatgacccttagtctgagaacattccagcataatcctctttcctgtctttgtgatcctattccttggggtctgggtaacatcagcatccatggaccctgtggaaatagagtgtccacatggactgagcgggctggcaaggc

SEQ ID NO: 756 - DNA, 495 bp, Artificial Sequence
  source: /note="Description of Artificial Sequence: Synthetic polynucleotide"
gcctccctcgcgccatcaggttccgaacacatggaatttcccaggacagagtcctccctcatcgcacccctcctagagacccccagccttacctacaacggttaacctggtccccgaaccgaaggtgtagccatagtcgacgttccgaacacatggatcaactggtggcacagaagtaaagagctgtctggttggggatggcagactctagggacagggagaatttagcctgtgcctgtcgagagacactgtatccatcagagatctctcctttgtttatatctttgacatcaaaggagtaatagatcaaccgtaggcccagtcctgggtcttgtcgataccagtacattctatcatgacccttagtctgagaacattccagcataatcctctttcctgtctttgtgatcctattccttggggtctgggtaacatcagcatccatggaccctgtggaaatgttccgaacacatggactgagcgggctggcaaggc

SEQ ID NO: 757 - DNA, 495 bp, Artificial Sequence
  source: /note="Description of Artificial Sequence: Synthetic polynucleotide"
gcctccctcgcgccatcagcgttacttcacatggactggattccagcccctttttgcaagttcccagctgtccagccttgacttactcacctacaacagtgagccaacttccctctccaaaatatatggtgtttcgtcgaccgttacttcacatggatcaactggtggcacagaagtaaagagctgtctggttggggatggcagactctagggacagggagaatttagcctgtgcctgtcgagagacactgtatccatcagagatctctcctttgtttatatctttgacatcaaaggagtaatagatcaaccgtaggcccagtcctgggtcttgtcgataccagtacattctatcatgacccttagtctgagaacattccagcataatcctctttcctgtctttgtgatcctattccttggggtctgggtaacatcagcatccatggaccctgtggaaatcgttacttcacatggactgagcgggctggcaaggc

SEQ ID NO: 758 - DNA, 495 bp, Artificial Sequence
  source: /note="Description of Artificial Sequence: Synthetic polynucleotide"
gcctccctcgcgccatcagtaggagaccacatggactcctggaactccgaccttatgatacactatcccgaaagaagtcttttacatacccaagacagagagctgggttccactgccaaaaaacagtttttcattgtcgactaggagaccacatggatcaactggtggcacagaagtaaagagctgtctggttggggatggcagactctagggacagggagaatttagcctgtgcctgtcgagagacactgtatccatcagagatctctcctttgtttatatctttgacatcaaaggagtaatagatcaaccgtaggcccagtcctgggtcttgtcgataccagtacattctatcatgacccttagtctgagaacattccagcataatcctctttcctgtctttgtgatcctattccttggggtctgggtaacatcagcatccatggaccctgtggaaattaggagaccacatggactgagcgggctggcaaggc

SEQ ID NO: 759 - DNA, 495 bp, Artificial Sequence
  source: /note="Description of Artificial Sequence: Synthetic polynucleotide"
gcctccctcgcgccatcaggacactctcacatggaagagaactctgccttcaagggacaatggccataccaccctgattctgcaacttacctaggatggagagtcgagtcccatcaccaaaatgctggggctgatgtcgacgacactctcacatggatcaactggtggcacagaagtaaagagctgtctggttggggatggcagactctagggacagggagaatttagcctgtgcctgtcgagagacactgtatccatcagagatctctcctttgtttatatctttgacatcaaaggagtaatagatcaaccgtaggcccagtcctgggtcttgtcgataccagtacattctatcatgacccttagtctgagaacattccagcataatcctctttcctgtctttgtgatcctattccttggggtctgggtaacatcagcatccatggaccctgtggaaatgacactctcacatggactgagcgggctggcaaggc

SEQ ID NO: 760 - DNA, 495 bp, Artificial Sequence
  source: /note="Description of Artificial Sequence: Synthetic polynucleotide"
gcctccctcgcgccatcagttcggaaccacatggaatcattgcagtcaaacccaggcacccccgagtcaagagtggagcccccatacctgtcacagtgagcctggtcccgttcccaaagtggaggggtgaattatgtcgacttcggaaccacatggatcaactggtggcacagaagtaaagagctgtctggttggggatggcagactctagggacagggagaatttagcctgtgcctgtcgagagacactgtatccatcagagatctctcctttgtttatatctttgacatcaaaggagtaatagatcaaccgtaggcccagtcctgggtcttgtcgataccagtacattctatcatgacccttagtctgagaacattccagcataatcctctttcctgtctttgtgatcctattccttggggtctgggtaacatcagcatccatggaccctgtggaaatttcggaaccacatggactgagcgggctggcaaggc

SEQ ID NO: 761 - DNA, 495 bp, Artificial Sequence
  source: /note="Description of Artificial Sequence: Synthetic polynucleotide"
gcctccctcgcgccatcagaagtaacgcacatggagggtcgtgcaggctgggctgctcaccctctctcccacctggagcccccttcttacctagcacggtgagccgtgtccctggcccgaagaactgctcattgtgtcgacaagtaacgcacatggatcaactggtggcacagaagtaaagagctgtctggttggggatggcagactctagggacagggagaatttagcctgtgcctgtcgagagacactgtatccatcagagatctctcctttgtttatatctttgacatcaaaggagtaatagatcaaccgtaggcccagtcctgggtcttgtcgataccagtacattctatcatgacccttagtctgagaacattccagcataatcctctttcctgtctttgtgatcctattccttggggtctgggtaacatcagcatccatggaccctgtggaaataagtaacgcacatggactgagcgggctggcaaggc

SEQ ID NO: 762 - DNA, 495 bp, Artificial Sequence
  source: /note="Description of Artificial Sequence: Synthetic polynucleotide"
gcctccctcgcgccatcaggtctcctacacatggacctctgcccatcccgccctctcggagctctccggagccccaaccgcctccttacccagtacggtcagcctagagccttctccaaaaaacagctccccggtgtcgacgtctcctacacatggatcaactggtggcacagaagtaaagagctgtctggttggggatggcagactctagggacagggagaatttagcctgtgcctgtcgagagacactgtatccatcagagatctctcctttgtttatatctttgacatcaaaggagtaatagatcaaccgtaggcccagtcctgggtcttgtcgataccagtacattctatcatgacccttagtctgagaacattccagcataatcctctttcctgtctttgtgatcctattccttggggtctgggtaacatcagcatccatggaccctgtggaaatgtctcctacacatggactgagcgggctggcaaggc

SEQ ID NO: 763 - DNA, 495 bp, Artificial Sequence
  source: /note="Description of Artificial Sequence: Synthetic polynucleotide"
gcctccctcgcgccatcaggtagacaccacatggagcgtcccggggcgccccctccccagttccggggcttcagcgggagcccccgcttaccgagcactgtcagccgggtgcctgggccaaaatactgcgtatctgtcgacgtagacaccacatggatcaactggtggcacagaagtaaagagctgtctggttggggatggcagactctagggacagggagaatttagcctgtgcctgtcgagagacactgtatccatcagagatctctcctttgtttatatctttgacatcaaaggagtaatagatcaaccgtaggcccagtcctgggtcttgtcgataccagtacattctatcatgacccttagtctgagaacattccagcataatcctctttcctgtctttgtgatcctattccttggggtctgggtaacatcagcatccatggaccctgtggaaatgtagacaccacatggactgagcgggctggcaaggc

SEQ ID NO: 764 - DNA, 495 bp, Artificial Sequence
  source: /note="Description of Artificial Sequence: Synthetic polynucleotide"
gcctccctcgcgccatcagcactgtaccacatggacgcacaaaaacccgagcgcagtctcgtccccggtcccccggcggccccagcttacccagcactgagagccgggtcccggcgccgaagtactgaatgttttgtcgaccactgtaccacatggatcaactggtggcacagaagtaaagagctgtctggttggggatggcagactctagggacagggagaatttagcctgtgcctgtcgagagacactgtatccatcagagatctctcctttgtttatatctttgacatcaaaggagtaatagatcaaccgtaggcccagtcctgggtcttgtcgataccagtacattctatcatgacccttagtctgagaacattccagcataatcctctttcctgtctttgtgatcctattccttggggtctgggtaacatcagcatccatggaccctgtggaaatcactgtaccacatggactgagcgggctggcaaggc

SEQ ID NO: 765 - DNA, 495 bp, Artificial Sequence
  source: /note="Description of Artificial Sequence: Synthetic polynucleotide"
gcctccctcgcgccatcaggatgatcccacatggaccccgcaaaaaccagacccaagccgcccgcgcccgcgccccagcagcccgcgctcaccgagcaccaggagccgcgtgcctggcccgaagtactgggtctcgtcgacgatgatcccacatggatcaactggtggcacagaagtaaagagctgtctggttggggatggcagactctagggacagggagaatttagcctgtgcctgtcgagagacactgtatccatcagagatctctcctttgtttatatctttgacatcaaaggagtaatagatcaaccgtaggcccagtcctgggtcttgtcgataccagtacattctatcatgacccttagtctgagaacattccagcataatcctctttcctgtctttgtgatcctattccttggggtctgggtaacatcagcatccatggaccctgtggaaatgatgatcccacatggactgagcgggctggcaaggc

SEQ ID NO: 766 - DNA, 495 bp, Artificial Sequence
  source: /note="Description of Artificial Sequence: Synthetic polynucleotide"
gcctccctcgcgccatcagcgccaatacacatggaccgccgccttccacctgaatcccgccgcccgggtggtcccgcgaaaactcacccagcacggtcagcctgctgccggccccgaaagtcaggacgttggcccgtcgaccgccaatacacatggatcaactggtggcacagaagtaaagagctgtctggttggggatggcagactctagggacagggagaatttagcctgtgcctgtcgagagacactgtatccatcagagatctctcctttgtttatatctttgacatcaaaggagtaatagatcaaccgtaggcccagtcctgggtcttgtcgataccagtacattctatcatgacccttagtctgagaacattccagcataatcctctttcctgtctttgtgatcctattccttggggtctgggtaacatcagcatccatggaccctgtggaaatcgccaatacacatggactgagcgggctggcaaggc

SEQ ID NO: 767 - DNA, 495 bp, Artificial Sequence
  source: /note="Description of Artificial Sequence: Synthetic polynucleotide"
gcctccctcgcgccatcagtcaagcctcacatggaccaccctccgactccggggaccgaggggctggaaggtggggagacgcccgaatctcacctgtgaccgtgagcctggtgcccggcccgaagtactgctcgtgtcgactcaagcctcacatggatcaactggtggcacagaagtaaagagctgtctggttggggatggcagactctagggacagggagaatttagcctgtgcctgtcgagagacactgtatccatcagagatctctcctttgtttatatctttgacatcaaaggagtaatagatcaaccgtaggcccagtcctgggtcttgtcgataccagtacattctatcatgacccttagtctgagaacattccagcataatcctctttcctgtctttgtgatcctattccttggggtctgggtaacatcagcatccatggaccctgtggaaattcaagcctcacatggactgagcgggctggcaaggc

SEQ ID NO: 768 - DNA, 495 bp, Artificial Sequence
  source: /note="Description of Artificial Sequence: Synthetic polynucleotide"
gcctccctcgcgccatcagagagtgtcttgaccatctgtggacccacttttccctgtgacggatctgcaaaagaacctgaaaaatgtcttacctacaactgtgagtctggtgccttgtccaaagaaagcttcagtgtcgacagagtgtcttgaccattcactgctggcacagaggtactgagaggtatgtgagggcctggcagactccagggtcaggggaaaatgctccgtccttattctggagactgttgactcagaggaaagatctcccttctctgtggaattaactccataggaatagtggatgaggtgtagttccattcctggatcttgttgataccagtacattttgtcatggcccatggtttgagaacattccagagtgatcttctttcctgtccctataacaaggtatcttggggtctggtagatgtcagcttccatgaggcctatgggaagaagagtgtcttgaccatctgagcgggctggcaaggc

SEQ ID NO: 769 - DNA, 495 bp, Artificial Sequence
  source: /note="Description of Artificial Sequence: Synthetic polynucleotide"
gcctccctcgcgccatcaggttccgaattgaccatatttcccaggacagagtcctccctcatcgcacccctcctagagacccccagccttacctacaacggttaacctggtccccgaaccgaaggtgtagccatagtcgacgttccgaattgaccattcactgctggcacagaggtactgagaggtatgtgagggcctggcagactccagggtcaggggaaaatgctccgtccttattctggagactgttgactcagaggaaagatctcccttctctgtggaattaactccataggaatagtggatgaggtgtagttccattcctggatcttgttgataccagtacattttgtcatggcccatggtttgagaacattccagagtgatcttctttcctgtccctataacaaggtatcttggggtctggtagatgtcagcttccatgaggcctatgggaagagttccgaattgaccatctgagcgggctggcaaggc

SEQ ID NO: 770 - DNA, 495 bp, Artificial Sequence
  source: /note="Description of Artificial Sequence: Synthetic polynucleotide"
gcctccctcgcgccatcagcgttacttttgaccatctggattccagcccctttttgcaagttcccagctgtccagccttgacttactcacctacaacagtgagccaacttccctctccaaaatatatggtgtttcgtcgaccgttacttttgaccattcactgctggcacagaggtactgagaggtatgtgagggcctggcagactccagggtcaggggaaaatgctccgtccttattctggagactgttgactcagaggaaagatctcccttctctgtggaattaactccataggaatagtggatgaggtgtagttccattcctggatcttgttgataccagtacattttgtcatggcccatggtttgagaacattccagagtgatcttctttcctgtccctataacaaggtatcttggggtctggtagatgtcagcttccatgaggcctatgggaagacgttacttttgaccatctgagcgggctggcaaggc

SEQ ID NO: 771 - DNA, 495 bp, Artificial Sequence
  source: /note="Description of Artificial Sequence: Synthetic polynucleotide"
gcctccctcgcgccatcagtaggagacttgaccatctcctggaactccgaccttatgatacactatcccgaaagaagtcttttacatacccaagacagagagctgggttccactgccaaaaaacagtttttcattgtcgactaggagacttgaccattcactgctggcacagaggtactgagaggtatgtgagggcctggcagactccagggtcaggggaaaatgctccgtccttattctggagactgttgactcagaggaaagatctcccttctctgtggaattaactccataggaatagtggatgaggtgtagttccattcctggatcttgttgataccagtacattttgtcatggcccatggtttgagaacattccagagtgatcttctttcctgtccctataacaaggtatcttggggtctggtagatgtcagcttccatgaggcctatgggaagataggagacttgaccatctgagcgggctggcaaggc

SEQ ID NO: 772 - DNA, 495 bp, Artificial Sequence
  source: /note="Description of Artificial Sequence: Synthetic polynucleotide"
gcctccctcgcgccatcaggacactctttgaccatagagaactctgccttcaagggacaatggccataccaccctgattctgcaacttacctaggatggagagtcgagtcccatcaccaaaatgctggggctgatgtcgacgacactctttgaccattcactgctggcacagaggtactgagaggtatgtgagggcctggcagactccagggtcaggggaaaatgctccgtccttattctggagactgttgactcagaggaaagatctcccttctctgtggaattaactccataggaatagtggatgaggtgtagttccattcctggatcttgttgataccagtacattttgtcatggcccatggtttgagaacattccagagtgatcttctttcctgtccctataacaaggtatcttggggtctggtagatgtcagcttccatgaggcctatgggaagagacactctttgaccatctgagcgggctggcaaggc

SEQ ID NO: 773 - DNA, 495 bp, Artificial Sequence
  source: /note="Description of Artificial Sequence: Synthetic polynucleotide"
gcctccctcgcgccatcagttcggaacttgaccatatcattgcagtcaaacccaggcacccccgagtcaagagtggagcccccatacctgtcacagtgagcctggtcccgttcccaaagtggaggggtgaattatgtcgacttcggaacttgaccattcactgctggcacagaggtactgagaggtatgtgagggcctggcagactccagggtcaggggaaaatgctccgtccttattctggagactgttgactcagaggaaagatctcccttctctgtggaattaactccataggaatagtggatgaggtgtagttccattcctggatcttgttgataccagtacattttgtcatggcccatggtttgagaacattccagagtgatcttctttcctgtccctataacaaggtatcttggggtctggtagatgtcagcttccatgaggcctatgggaagattcggaacttgaccatctgagcgggctggcaaggc

SEQ ID NO: 774 - DNA, 495 bp, Artificial Sequence
  source: /note="Description of Artificial Sequence: Synthetic polynucleotide"
gcctccctcgcgccatcagaagtaacgttgaccatgggtcgtgcaggctgggctgctcaccctctctcccacctggagcccccttcttacctagcacggtgagccgtgtccctggcccgaagaactgctcattgtgtcgacaagtaacgttgaccattcactgctggcacagaggtactgagaggtatgtgagggcctggcagactccagggtcaggggaaaatgctccgtccttattctggagactgttgactcagaggaaagatctcccttctctgtggaattaactccataggaatagtggatgaggtgtagttccattcctggatcttgttgataccagtacattttgtcatggcccatggtttgagaacattccagagtgatcttctttcctgtccctataacaaggtatcttggggtctggtagatgtcagcttccatgaggcctatgggaagaaagtaacgttgaccatctgagcgggctggcaaggc

SEQ ID NO: 775 - DNA, 495 bp, Artificial Sequence
  source: /note="Description of Artificial Sequence: Synthetic polynucleotide"
gcctccctcgcgccatcaggtctcctattgaccatcctctgcccatcccgccctctcggagctctccggagccccaaccgcctccttacccagtacggtcagcctagagccttctccaaaaaacagctccccggtgtcgacgtctcctattgaccattcactgctggcacagaggtactgagaggtatgtgagggcctggcagactccagggtcaggggaaaatgctccgtccttattctggagactgttgactcagaggaaagatctcccttctctgtggaattaactccataggaatagtggatgaggtgtagttccattcctggatcttgttgataccagtacattttgtcatggcccatggtttgagaacattccagagtgatcttctttcctgtccctataacaaggtatcttggggtctggtagatgtcagcttccatgaggcctatgggaagagtctcctattgaccatctgagcgggctggcaaggc

SEQ ID NO: 776 - DNA, 495 bp, Artificial Sequence
  source: /note="Description of Artificial Sequence: Synthetic polynucleotide"
gcctccctcgcgccatcaggtagacacttgaccatgcgtcccggggcgccccctccccagttccggggcttcagcgggagcccccgcttaccgagcactgtcagccgggtgcctgggccaaaatactgcgtatctgtcgacgtagacacttgaccattcactgctggcacagaggtactgagaggtatgtgagggcctggcagactccagggtcaggggaaaatgctccgtccttattctggagactgttgactcagaggaaagatctcccttctctgtggaattaactccataggaatagtggatgaggtgtagttccattcctggatcttgttgataccagtacattttgtcatggcccatggtttgagaacattccagagtgatcttctttcctgtccctataacaaggtatcttggggtctggtagatgtcagcttccatgaggcctatgggaagagtagacacttgaccatctgagcgggctggcaaggc

SEQ ID NO: 777 - DNA, 495 bp, Artificial Sequence
  source: /note="Description of Artificial Sequence: Synthetic polynucleotide"
gcctccctcgcgccatcagcactgtacttgaccatcgcacaaaaacccgagcgcagtctcgtccccggtcccccggcggccccagcttacccagcactgagagccgggtcccggcgccgaagtactgaatgttttgtcgaccactgtacttgaccattcactgctggcacagaggtactgagaggtatgtgagggcctggcagactccagggtcaggggaaaatgctccgtccttattctggagactgttgactcagaggaaagatctcccttctctgtggaattaactccataggaatagtggatgaggtgtagttccattcctggatcttgttgataccagtacattttgtcatggcccatggtttgagaacattccagagtgatcttctttcctgtccctataacaaggtatcttggggtctggtagatgtcagcttccatgaggcctatgggaagacactgtacttgaccatctgagcgggctggcaaggc

SEQ ID NO: 778 - DNA, 495 bp, Artificial Sequence
  source: /note="Description of Artificial Sequence: Synthetic polynucleotide"
gcctccctcgcgccatcaggatgatccttgaccatccccgcaaaaaccagacccaagccgcccgcgcccgcgccccagcagcccgcgctcaccgagcaccaggagccgcgtgcctggcccgaagtactgggtctcgtcgacgatgatccttgaccattcactgctggcacagaggtactgagaggtatgtgagggcctggcagactccagggtcaggggaaaatgctccgtccttattctggagactgttgactcagaggaaagatctcccttctctgtggaattaactccataggaatagtggatgaggtgtagttccattcctggatcttgttgataccagtacattttgtcatggcccatggtttgagaacattccagagtgatcttctttcctgtccctataacaaggtatcttggggtctggtagatgtcagcttccatgaggcctatgggaagagatgatccttgaccatctgagcgggctggcaaggc

SEQ ID NO: 779 - DNA, 495 bp, Artificial Sequence
  source: /note="Description of Artificial Sequence: Synthetic polynucleotide"
gcctccctcgcgccatcagcgccaatattgaccatccgccgccttccacctgaatcccgccgcccgggtggtcccgcgaaaactcacccagcacggtcagcctgctgccggccccgaaagtcaggacgttggcccgtcgaccgccaatattgaccattcactgctggcacagaggtactgagaggtatgtgagggcctggcagactccagggtcaggggaaaatgctccgtccttattctggagactgttgactcagaggaaagatctcccttctctgtggaattaactccataggaatagtggatgaggtgtagttccattcctggatcttgttgataccagtacattttgtcatggcccatggtttgagaacattccagagtgatcttctttcctgtccctataacaaggtatcttggggtctggtagatgtcagcttccatgaggcctatgggaagacgccaatattgaccatctgagcgggctggcaaggc

SEQ ID NO: 780 - DNA, 495 bp, Artificial Sequence
  source: /note="Description of Artificial Sequence: Synthetic polynucleotide"
gcctccctcgcgccatcagtcaagcctttgaccatccaccctccgactccggggaccgaggggctggaaggtggggagacgcccgaatctcacctgtgaccgtgagcctggtgcccggcccgaagtactgctcgtgtcgactcaagcctttgaccattcactgctggcacagaggtactgagaggtatgtgagggcctggcagactccagggtcaggggaaaatgctccgtccttattctggagactgttgactcagaggaaagatctcccttctctgtggaattaactccataggaatagtggatgaggtgtagttccattcctggatcttgttgataccagtacattttgtcatggcccatggtttgagaacattccagagtgatcttctttcctgtccctataacaaggtatcttggggtctggtagatgtcagcttccatgaggcctatgggaagatcaagcctttgaccatctgagcgggctggcaaggc

SEQ ID NO: 781 - DNA, 495 bp, Artificial Sequence
  source: /note="Description of Artificial Sequence: Synthetic polynucleotide"
gcctccctcgcgccatcagagagtgtcgtgacttgctgtggacccacttttccctgtgacggatctgcaaaagaacctgaaaaatgtcttacctacaactgtgagtctggtgccttgtccaaagaaagcttcagtgtcgacagagtgtcgtgacttgtcactgctggcatagagatacacagatgtctggttggtgctggcagacttcagggtcaggggaaaagatgctatagtatttcaagaaacatgatacccctcagagatatctcctttttcagtgctcccagtgccaggtgaataatagaccagcttcagtccaagtcctgggtcctgtcgataccagtacattgtaacatgattcatattctgggaacactgtagaatgaattcctttcctgtcccaatgattctgtgtcttgggaattgtgtaactacagcatccttgaggcctgttggggggagagtgtcgtgacttgctgagcgggctggcaaggc

SEQ ID NO: 782 - DNA, 495 bp, Artificial Sequence
  source: /note="Description of Artificial Sequence: Synthetic polynucleotide"
gcctccctcgcgccatcaggttccgaagtgacttgatttcccaggacagagtcctccctcatcgcacccctcctagagacccccagccttacctacaacggttaacctggtccccgaaccgaaggtgtagccatagtcgacgttccgaagtgacttgtcactgctggcatagagatacacagatgtctggttggtgctggcagacttcagggtcaggggaaaagatgctatagtatttcaagaaacatgatacccctcagagatatctcctttttcagtgctcccagtgccaggtgaataatagaccagcttcagtccaagtcctgggtcctgtcgataccagtacattgtaacatgattcatattctgggaacactgtagaatgaattcctttcctgtcccaatgattctgtgtcttgggaattgtgtaactacagcatccttgaggcctgttgggggggttccgaagtgacttgctgagcgggctggcaaggc

SEQ ID NO: 783 - DNA, 495 bp, Artificial Sequence
  source: /note="Description of Artificial Sequence: Synthetic polynucleotide"
gcctccctcgcgccatcagcgttacttgtgacttgctggattccagcccctttttgcaagttcccagctgtccagccttgacttactcacctacaacagtgagccaacttccctctccaaaatatatggtgtttcgtcgaccgttacttgtgacttgtcactgctggcatagagatacacagatgtctggttggtgctggcagacttcagggtcaggggaaaagatgctatagtatttcaagaaacatgatacccctcagagatatctcctttttcagtgctcccagtgccaggtgaataatagaccagcttcagtccaagtcctgggtcctgtcgataccagtacattgtaacatgattcatattctgggaacactgtagaatgaattcctttcctgtcccaatgattctgtgtcttgggaattgtgtaactacagcatccttgaggcctgttggggggcgttacttgtgacttgctgagcgggctggcaaggc

SEQ ID NO: 784 - DNA, 495 bp, Artificial Sequence
  source: /note="Description of Artificial Sequence: Synthetic polynucleotide"
gcctccctcgcgccatcagtaggagacgtgacttgctcctggaactccgaccttatgatacactatcccgaaagaagtcttttacatacccaagacagagagctgggttccactgccaaaaaacagtttttcattgtcgactaggagacgtgacttgtcactgctggcatagagatacacagatgtctggttggtgctggcagacttcagggtcaggggaaaagatgctatagtatttcaagaaacatgatacccctcagagatatctcctttttcagtgctcccagtgccaggtgaataatagaccagcttcagtccaagtcctgggtcctgtcgataccagtacattgtaacatgattcatattctgggaacactgtagaatgaattcctttcctgtcccaatgattctgtgtcttgggaattgtgtaactacagcatccttgaggcctgttggggggtaggagacgtgacttgctgagcgggctggcaaggc

SEQ ID NO: 785 - DNA, 495 bp, Artificial Sequence
  source: /note="Description of Artificial Sequence: Synthetic polynucleotide"
gcctccctcgcgccatcaggacactctgtgacttgagagaactctgccttcaagggacaatggccataccaccctgattctgcaacttacctaggatggagagtcgagtcccatcaccaaaatgctggggctgatgtcgacgacactctgtgacttgtcactgctggcatagagatacacagatgtctggttggtgctggcagacttcagggtcaggggaaaagatgctatagtatttcaagaaacatgatacccctcagagatatctcctttttcagtgctcccagtgccaggtgaataatagaccagcttcagtccaagtcctgggtcctgtcgataccagtacattgtaacatgattcatattctgggaacactgtagaatgaattcctttcctgtcccaatgattctgtgtcttgggaattgtgtaactacagcatccttgaggcctgttgggggggacactctgtgacttgctgagcgggctggcaaggc

SEQ ID NO: 786 - DNA, 495 bp, Artificial Sequence
  source: /note="Description of Artificial Sequence: Synthetic polynucleotide"
gcctccctcgcgccatcagttcggaacgtgacttgatcattgcagtcaaacccaggcacccccgagtcaagagtggagcccccatacctgtcacagtgagcctggtcccgttcccaaagtggaggggtgaattatgtcgacttcggaacgtgacttgtcactgctggcatagagatacacagatgtctggttggtgctggcagacttcagggtcaggggaaaagatgctatagtatttcaagaaacatgatacccctcagagatatctcctttttcagtgctcccagtgccaggtgaataatagaccagcttcagtccaagtcctgggtcctgtcgataccagtacattgtaacatgattcatattctgggaacactgtagaatgaattcctttcctgtcccaatgattctgtgtcttgggaattgtgtaactacagcatccttgaggcctgttggggggttcggaacgtgacttgctgagcgggctggcaaggc

SEQ ID NO: 787 - DNA, 495 bp, Artificial Sequence
  source: /note="Description of Artificial Sequence: Synthetic polynucleotide"
gcctccctcgcgccatcagaagtaacggtgacttggggtcgtgcaggctgggctgctcaccctctctcccacctggagcccccttcttacctagcacggtgagccgtgtccctggcccgaagaactgctcattgtgtcgacaagtaacggtgacttgtcactgctggcatagagatacacagatgtctggttggtgctggcagacttcagggtcaggggaaaagatgctatagtatttcaagaaacatgatacccctcagagatatctcctttttcagtgctcccagtgccaggtgaataatagaccagcttcagtccaagtcctgggtcctgtcgataccagtacattgtaacatgattcatattctgggaacactgtagaatgaattcctttcctgtcccaatgattctgtgtcttgggaattgtgtaactacagcatccttgaggcctgttggggggaagtaacggtgacttgctgagcgggctggcaaggc

SEQ ID NO: 788 - DNA, 495 bp, Artificial Sequence
  source: /note="Description of Artificial Sequence: Synthetic polynucleotide"
gcctccctcgcgccatcaggtctcctagtgacttgcctctgcccatcccgccctctcggagctctccggagccccaaccgcctccttacccagtacggtcagcctagagccttctccaaaaaacagctccccggtgtcgacgtctcctagtgacttgtcactgctggcatagagatacacagatgtctggttggtgctggcagacttcagggtcaggggaaaagatgctatagtatttcaagaaacatgatacccctcagagatatctcctttttcagtgctcccagtgccaggtgaataatagaccagcttcagtccaagtcctgggtcctgtcgataccagtacattgtaacatgattcatattctgggaacactgtagaatgaattcctttcctgtcccaatgattctgtgtcttgggaattgtgtaactacagcatccttgaggcctgttgggggggtctcctagtgacttgctgagcgggctggcaaggc

SEQ ID NO: 789 - DNA, 495 bp, Artificial Sequence
  source: /note="Description of Artificial Sequence: Synthetic polynucleotide"
gcctccctcgcgccatcaggtagacacgtgacttggcgtcccggggcgccccctccccagttccggggcttcagcgggagcccccgcttaccgagcactgtcagccgggtgcctgggccaaaatactgcgtatctgtcgacgtagacacgtgacttgtcactgctggcatagagatacacagatgtctggttggtgctggcagacttcagggtcaggggaaaagatgctatagtatttcaagaaacatgatacccctcagagatatctcctttttcagtgctcccagtgccaggtgaataatagaccagcttcagtccaagtcctgggtcctgtcgataccagtacattgtaacatgattcatattctgggaacactgtagaatgaattcctttcctgtcccaatgattctgtgtcttgggaattgtgtaactacagcatccttgaggcctgttgggggggtagacacgtgacttgctgagcgggctggcaaggc

SEQ ID NO: 790 - DNA, 495 bp, Artificial Sequence
  source: /note="Description of Artificial Sequence: Synthetic polynucleotide"
gcctccctcgcgccatcagcactgtacgtgacttgcgcacaaaaacccgagcgcagtctcgtccccggtcccccggcggccccagcttacccagcactgagagccgggtcccggcgccgaagtactgaatgttttgtcgaccactgtacgtgacttgtcactgctggcatagagatacacagatgtctggttggtgctggcagacttcagggtcaggggaaaagatgctatagtatttcaagaaacatgatacccctcagagatatctcctttttcagtgctcccagtgccaggtgaataatagaccagcttcagtccaagtcctgggtcctgtcgataccagtacattgtaacatgattcatattctgggaacactgtagaatgaattcctttcctgtcccaatgattctgtgtcttgggaattgtgtaactacagcatccttgaggcctgttggggggcactgtacgtgacttgctgagcgggctggcaaggc

SEQ ID NO: 791 - DNA, 495 bp, Artificial Sequence
  source: /note="Description of Artificial Sequence: Synthetic polynucleotide"
gcctccctcgcgccatcaggatgatccgtgacttgccccgcaaaaaccagacccaagccgcccgcgcccgcgccccagcagcccgcgctcaccgagcaccaggagccgcgtgcctggcccgaagtactgggtctcgtcgacgatgatccgtgacttgtcactgctggcatagagatacacagatgtctggttggtgctggcagacttcagggtcaggggaaaagatgctatagtatttcaagaaacatgatacccctcagagatatctcctttttcagtgctcccagtgccaggtgaataatagaccagcttcagtccaagtcctgggtcctgtcgataccagtacattgtaacatgattcatattctgggaacactgtagaatgaattcctttcctgtcccaatgattctgtgtcttgggaattgtgtaactacagcatccttgaggcctgttgggggggatgatccgtgacttgctgagcgggctggcaaggc

SEQ ID NO: 792 - DNA, 495 bp, Artificial Sequence
  source: /note="Description of Artificial Sequence: Synthetic polynucleotide"
gcctccctcgcgccatcagcgccaatagtgacttgccgccgccttccacctgaatcccgccgcccgggtggtcccgcgaaaactcacccagcacggtcagcctgctgccggccccgaaagtcaggacgttggcccgtcgaccgccaatagtgacttgtcactgctggcatagagatacacagatgtctggttggtgctggcagacttcagggtcaggggaaaagatgctatagtatttcaagaaacatgatacccctcagagatatctcctttttcagtgctcccagtgccaggtgaataatagaccagcttcagtccaagtcctgggtcctgtcgataccagtacattgtaacatgattcatattctgggaacactgtagaatgaattcctttcctgtcccaatgattctgtgtcttgggaattgtgtaactacagcatccttgaggcctgttggggggcgccaatagtgacttgctgagcgggctggcaaggc

SEQ ID NO: 793 - DNA, 495 bp, Artificial Sequence
  source: /note="Description of Artificial Sequence: Synthetic polynucleotide"
gcctccctcgcgccatcagtcaagcctgtgacttgccaccctccgactccggggaccgaggggctggaaggtggggagacgcccgaatctcacctgtgaccgtgagcctggtgcccggcccgaagtactgctcgtgtcgactcaagcctgtgacttgtcactgctggcatagagatacacagatgtctggttggtgctggcagacttcagggtcaggggaaaagatgctatagtatttcaagaaacatgatacccctcagagatatctcctttttcagtgctcccagtgccaggtgaataatagaccagcttcagtccaagtcctgggtcctgtcgataccagtacattgtaacatgattcatattctgggaacactgtagaatgaattcctttcctgtcccaatgattctgtgtcttgggaattgtgtaactacagcatccttgaggcctgttggggggtcaagcctgtgacttgctgagcgggctggcaaggc

SEQ ID NO: 794 - DNA, 495 bp, Artificial Sequence
  source: /note="Description of Artificial Sequence: Synthetic polynucleotide"
gcctccctcgcgccatcagagagtgtcaagccatcctgtggacccacttttccctgtgacggatctgcaaaagaacctgaaaaatgtcttacctacaactgtgagtctggtgccttgtccaaagaaagcttcagtgtcgacagagtgtcaagccatctcactgctggcacagaagtacagagaggtctggttggggctgggcgactccaggatcagggggaaattcctcttctcttttcgagagactttgtacccttcaggaacatctcccttatcagtcacctcaacattcattgaatagtagatctgccttaagcccagccctgggtcttgtcgataccaggacatatactcatggttcatattctgagaacaagtcactgttaacttctttccagtcactgtgatgaggtatcttgggttctgggtcacttgggcttccagggggcctgtaaaggaaagagtgtcaagccatcctgagcgggctggcaaggc

SEQ ID NO: 795 - DNA, 495 bp, Artificial Sequence
  source: /note="Description of Artificial Sequence: Synthetic polynucleotide"
gcctccctcgcgccatcaggttccgaaaagccatcatttcccaggacagagtcctccctcatcgcacccctcctagagacccccagccttacctacaacggttaacctggtccccgaaccgaaggtgtagccatagtcgacgttccgaaaagccatctcactgctggcacagaagtacagagaggtctggttggggctgggcgactccaggatcagggggaaattcctcttctcttttcgagagactttgtacccttcaggaacatctcccttatcagtcacctcaacattcattgaatagtagatctgccttaagcccagccctgggtcttgtcgataccaggacatatactcatggttcatattctgagaacaagtcactgttaacttctttccagtcactgtgatgaggtatcttgggttctgggtcacttgggcttccagggggcctgtaaaggaagttccgaaaagccatcctgagcgggctggcaaggc

SEQ ID NO: 796 - DNA, 495 bp, Artificial Sequence
  source: /note="Description of Artificial Sequence: Synthetic polynucleotide"
gcctccctcgcgccatcagcgttacttaagccatcctggattccagcccctttttgcaagttcccagctgtccagccttgacttactcacctacaacagtgagccaacttccctctccaaaatatatggtgtttcgtcgaccgttacttaagccatctcactgctggcacagaagtacagagaggtctggttggggctgggcgactccaggatcagggggaaattcctcttctcttttcgagagactttgtacccttcaggaacatctcccttatcagtcacctcaacattcattgaatagtagatctgccttaagcccagccctgggtcttgtcgataccaggacatatactcatggttcatattctgagaacaagtcactgttaacttctttccagtcactgtgatgaggtatcttgggttctgggtcacttgggcttccagggggcctgtaaaggaacgttacttaagccatcctgagcgggctggcaaggc

SEQ ID NO: 797 - DNA, 495 bp, Artificial Sequence
  source: /note="Description of Artificial Sequence: Synthetic polynucleotide"
gcctccctcgcgccatcagtaggagacaagccatcctcctggaactccgaccttatgatacactatcccgaaagaagtcttttacatacccaagacagagagctgggttccactgccaaaaaacagtttttcattgtcgactaggagacaagccatctcactgctggcacagaagtacagagaggtctggttggggctgggcgactccaggatcagggggaaattcctcttctcttttcgagagactttgtacccttcaggaacatctcccttatcagtcacctcaacattcattgaatagtagatctgccttaagcccagccctgggtcttgtcgataccaggacatatactcatggttcatattctgagaacaagtcactgttaacttctttccagtcactgtgatgaggtatcttgggttctgggtcacttgggcttccagggggcctgtaaaggaataggagacaagccatcctgagcgggctggcaaggc

SEQ ID NO: 798 - DNA, 495 bp, Artificial Sequence
  source: /note="Description of Artificial Sequence: Synthetic polynucleotide"
gcctccctcgcgccatcaggacactctaagccatcagagaactctgccttcaagggacaatggccataccaccctgattctgcaacttacctaggatggagagtcgagtcccatcaccaaaatgctggggctgatgtcgacgacactctaagccatctcactgctggcacagaagtacagagaggtctggttggggctgggcgactccaggatcagggggaaattcctcttctcttttcgagagactttgtacccttcaggaacatctcccttatcagtcacctcaacattcattgaatagtagatctgccttaagcccagccctgggtcttgtcgataccaggacatatactcatggttcatattctgagaacaagtcactgttaacttctttccagtcactgtgatgaggtatcttgggttctgggtcacttgggcttccagggggcctgtaaaggaagacactctaagccatcctgagcgggctggcaaggc

SEQ ID NO: 799 - DNA, 495 bp, Artificial Sequence
  source: /note="Description of Artificial Sequence: Synthetic polynucleotide"
gcctccctcgcgccatcagttcggaacaagccatcatcattgcagtcaaacccaggcacccccgagtcaagagtggagcccccatacctgtcacagtgagcctggtcccgttcccaaagtggaggggtgaattatgtcgacttcggaacaagccatctcactgctggcacagaagtacagagaggtctggttggggctgggcgactccaggatcagggggaaattcctcttctcttttcgagagactttgtacccttcaggaacatctcccttatcagtcacctcaacattcattgaatagtagatctgccttaagcccagccctgggtcttgtcgataccaggacatatactcatggttcatattctgagaacaagtcactgttaacttctttccagtcactgtgatgaggtatcttgggttctgggtcacttgggcttccagggggcctgtaaaggaattcggaacaagccatcctgagcgggctggcaaggc

SEQ ID NO: 800 - DNA, 495 bp, Artificial Sequence
  source: /note="Description of Artificial Sequence: Synthetic polynucleotide"
gcctccctcgcgccatcagaagtaacgaagccatcgggtcgtgcaggctgggctgctcaccctctctcccacctggagcccccttcttacctagcacggtgagccgtgtccctggcccgaagaactgctcattgtgtcgacaagtaacgaagccatctcactgctggcacagaagtacagagaggtctggttggggctgggcgactccaggatcagggggaaattcctcttctcttttcgagagactttgtacccttcaggaacatctcccttatcagtcacctcaacattcattgaatagtagatctgccttaagcccagccctgggtcttgtcgataccaggacatatactcatggttcatattctgagaacaagtcactgttaacttctttccagtcactgtgatgaggtatcttgggttctgggtcacttgggcttccagggggcctgtaaaggaaaagtaacgaagccatcctgagcgggctggcaaggc

SEQ ID NO: 801 - DNA, 495 bp, Artificial Sequence
  source: /note="Description of Artificial Sequence: Synthetic polynucleotide"
gcctccctcgcgccatcaggtctcctaaagccatccctctgcccatcccgccctctcggagctctccggagccccaaccgcctccttacccagtacggtcagcctagagccttctccaaaaaacagctccccggtgtcgacgtctcctaaagccatctcactgctggcacagaagtacagagaggtctggttggggctgggcgactccaggatcagggggaaattcctcttctcttttcgagagactttgtacccttcaggaacatctcccttatcagtcacctcaacattcattgaatagtagatctgccttaagcccagccctgggtcttgtcgataccaggacatatactcatggttcatattctgagaacaagtcactgttaacttctttccagtcactgtgatgaggtatcttgggttctgggtcacttgggcttccagggggcctgtaaaggaagtctcctaaagccatcctgagcgggctggcaaggc

SEQ ID NO: 802 - DNA, 495 bp, Artificial Sequence
  source: /note="Description of Artificial Sequence: Synthetic polynucleotide"
gcctccctcgcgccatcaggtagacacaagccatcgcgtcccggggcgccccctccccagttccggggcttcagcgggagcccccgcttaccgagcactgtcagccgggtgcctgggccaaaatactgcgtatctgtcgacgtagacacaagccatctcactgctggcacagaagtacagagaggtctggttggggctgggcgactccaggatcagggggaaattcctcttctcttttcgagagactttgtacccttcaggaacatctcccttatcagtcacctcaacattcattgaatagtagatctgccttaagcccagccctgggtcttgtcgataccaggacatatactcatggttcatattctgagaacaagtcactgttaacttctttccagtcactgtgatgaggtatcttgggttctgggtcacttgggcttccagggggcctgtaaaggaagtagacacaagccatcctgagcgggctggcaaggc

SEQ ID NO: 803 - DNA, 495 bp, Artificial Sequence
  source: /note="Description of Artificial Sequence: Synthetic polynucleotide"
gcctccctcgcgccatcagcactgtacaagccatccgcacaaaaacccgagcgcagtctcgtccccggtcccccggcggccccagcttacccagcactgagagccgggtcccggcgccgaagtactgaatgttttgtcgaccactgtacaagccatctcactgctggcacagaagtacagagaggtctggttggggctgggcgactccaggatcagggggaaattcctcttctcttttcgagagactttgtacccttcaggaacatctcccttatcagtcacctcaacattcattgaatagtagatctgccttaagcccagccctgggtcttgtcgataccaggacatatactcatggttcatattctgagaacaagtcactgttaacttctttccagtcactgtgatgaggtatcttgggttctgggtcacttgggcttccagggggcctgtaaaggaacactgtacaagccatcctgagcgggctggcaaggc

SEQ ID NO: 804 - DNA, 495 bp, Artificial Sequence
  source: /note="Description of Artificial Sequence: Synthetic polynucleotide"
gcctccctcgcgccatcaggatgatccaagccatcccccgcaaaaaccagacccaagccgcccgcgcccgcgccccagcagcccgcgctcaccgagcaccaggagccgcgtgcctggcccgaagtactgggtctcgtcgacgatgatccaagccatctcactgctggcacagaagtacagagaggtctggttggggctgggcgactccaggatcagggggaaattcctcttctcttttcgagagactttgtacccttcaggaacatctcccttatcagtcacctcaacattcattgaatagtagatctgccttaagcccagccctgggtcttgtcgataccaggacatatactcatggttcatattctgagaacaagtcactgttaacttctttccagtcactgtgatgaggtatcttgggttctgggtcacttgggcttccagggggcctgtaaaggaagatgatccaagccatcctgagcgggctggcaaggc

SEQ ID NO: 805 - DNA, 495 bp, Artificial Sequence
  source: /note="Description of Artificial Sequence: Synthetic polynucleotide"
gcctccctcgcgccatcagcgccaataaagccatcccgccgccttccacctgaatcccgccgcccgggtggtcccgcgaaaactcacccagcacggtcagcctgctgccggccccgaaagtcaggacgttggcccgtcgaccgccaataaagccatctcactgctggcacagaagtacagagaggtctggttggggctgggcgactccaggatcagggggaaattcctcttctcttttcgagagactttgtacccttcaggaacatctcccttatcagtcacctcaacattcattgaatagtagatctgccttaagcccagccctgggtcttgtcgataccaggacatatactcatggttcatattctgagaacaagtcactgttaacttctttccagtcactgtgatgaggtatcttgggttctgggtcacttgggcttccagggggcctgtaaaggaacgccaataaagccatcctgagcgggctggcaaggc

SEQ ID NO: 806 - DNA, 495 bp, Artificial Sequence
  source: /note="Description of Artificial Sequence: Synthetic polynucleotide"
gcctccctcgcgccatcagtcaagcctaagccatcccaccctccgactccggggaccgaggggctggaaggtggggagacgcccgaatctcacctgtgaccgtgagcctggtgcccggcccgaagtactgctcgtgtcgactcaagcctaagccatctcactgctggcacagaagtacagagaggtctggttggggctgggcgactccaggatcagggggaaattcctcttctcttttcgagagactttgtacccttcaggaacatctcccttatcagtcacctcaacattcattgaatagtagatctgccttaagcccagccctgggtcttgtcgataccaggacatatactcatggttcatattctgagaacaagtcactgttaacttctttccagtcactgtgatgaggtatcttgggttctgggtcacttgggcttccagggggcctgtaaaggaatcaagcctaagccatcctgagcgggctggcaaggc

SEQ ID NO: 807 - DNA, 495 bp, Artificial Sequence
  source: /note="Description of Artificial Sequence: Synthetic polynucleotide"
gcctccctcgcgccatcagagagtgtcgattgcagctgtggacccacttttccctgtgacggatctgcaaaagaacctgaaaaatgtcttacctacaactgtgagtctggtgccttgtccaaagaaagcttcagtgtcgacagagtgtcgattgcagtcactgctggcacagaggtacatagatgtctggttggtgctggcggactccagaatcagggagaagcgctccttcttctctctagagacactgtacccctcaggaatatctcctttttctttcattttaacatcatatgagaaatagatcagccgtagccccagacctgggtcttgtcgataccagaacatattttcatggtccatatcctggacacattccagaaaaactttctctcccgtccttttgactagatatctcgagctctgggttactttcacatctacgaggcctgtgagagacagagtgtcgattgcagctgagcgggctggcaaggc

SEQ ID NO: 808 - DNA, 495 bp, Artificial Sequence
  source: /note="Description of Artificial Sequence: Synthetic polynucleotide"
gcctccctcgcgccatcaggttccgaagattgcagatttcccaggacagagtcctccctcatcgcacccctcctagagacccccagccttacctacaacggttaacctggtccccgaaccgaaggtgtagccatagtcgacgttccgaagattgcagtcactgctggcacagaggtacatagatgtctggttggtgctggcggactccagaatcagggagaagcgctccttcttctctctagagacactgtacccctcaggaatatctcctttttctttcattttaacatcatatgagaaatagatcagccgtagccccagacctgggtcttgtcgataccagaacatattttcatggtccatatcctggacacattccagaaaaactttctctcccgtccttttgactagatatctcgagctctgggttactttcacatctacgaggcctgtgagagacgttccgaagattgcagctgagcgggctggcaaggc

SEQ ID NO: 809 - DNA, 495 bp, Artificial Sequence
  source: /note="Description of Artificial Sequence: Synthetic polynucleotide"
gcctccctcgcgccatcagcgttacttgattgcagctggattccagcccctttttgcaagttcccagctgtccagccttgacttactcacctacaacagtgagccaacttccctctccaaaatatatggtgtttcgtcgaccgttacttgattgcagtcactgctggcacagaggtacatagatgtctggttggtgctggcggactccagaatcagggagaagcgctccttcttctctctagagacactgtacccctcaggaatatctcctttttctttcattttaacatcatatgagaaatagatcagccgtagccccagacctgggtcttgtcgataccagaacatattttcatggtccatatcctggacacattccagaaaaactttctctcccgtccttttgactagatatctcgagctctgggttactttcacatctacgaggcctgtgagagaccgttacttgattgcagctgagcgggctggcaaggc

SEQ ID NO: 810 - DNA, 495 bp, Artificial Sequence
  source: /note="Description of Artificial Sequence: Synthetic polynucleotide"
gcctccctcgcgccatcagtaggagacgattgcagctcctggaactccgaccttatgatacactatcccgaaagaagtcttttacatacccaagacagagagctgggttccactgccaaaaaacagtttttcattgtcgactaggagacgattgcagtcactgctggcacagaggtacatagatgtctggttggtgctggcggactccagaatcagggagaagcgctccttcttctctctagagacactgtacccctcaggaatatctcctttttctttcattttaacatcatatgagaaatagatcagccgtagccccagacctgggtcttgtcgataccagaacatattttcatggtccatatcctggacacattccagaaaaactttctctcccgtccttttgactagatatctcgagctctgggttactttcacatctacgaggcctgtgagagactaggagacgattgcagctgagcgggctggcaaggc

SEQ ID NO: 811 - DNA, 495 bp, Artificial Sequence
  source: /note="Description of Artificial Sequence: Synthetic polynucleotide"
gcctccctcgcgccatcaggacactctgattgcagagagaactctgccttcaagggacaatggccataccaccctgattctgcaacttacctaggatggagagtcgagtcccatcaccaaaatgctggggctgatgtcgacgacactctgattgcagtcactgctggcacagaggtacatagatgtctggttggtgctggcggactccagaatcagggagaagcgctccttcttctctctagagacactgtacccctcaggaatatctcctttttctttcattttaacatcatatgagaaatagatcagccgtagccccagacctgggtcttgtcgataccagaacatattttcatggtccatatcctggacacattccagaaaaactttctctcccgtccttttgactagatatctcgagctctgggttactttcacatctacgaggcctgtgagagacgacactctgattgcagctgagcgggctggcaaggc

SEQ ID NO: 812 - DNA, 495 bp, Artificial Sequence
  source: /note="Description of Artificial Sequence: Synthetic polynucleotide"
gcctccctcgcgccatcagttcggaacgattgcagatcattgcagtcaaacccaggcacccccgagtcaagagtggagcccccatacctgtcacagtgagcctggtcccgttcccaaagtggaggggtgaattatgtcgacttcggaacgattgcagtcactgctggcacagaggtacatagatgtctggttggtgctggcggactccagaatcagggagaagcgctccttcttctctctagagacactgtacccctcaggaatatctcctttttctttcattttaacatcatatgagaaatagatcagccgtagccccagacctgggtcttgtcgataccagaacatattttcatggtccatatcctggacacattccagaaaaactttctctcccgtccttttgactagatatctcgagctctgggttactttcacatctacgaggcctgtgagagacttcggaacgattgcagctgagcgggctggcaaggc

SEQ ID NO: 813 - DNA, 495 bp, Artificial Sequence
  source: /note="Description of Artificial Sequence: Synthetic polynucleotide"
gcctccctcgcgccatcagaagtaacggattgcaggggtcgtgcaggctgggctgctcaccctctctcccacctggagcccccttcttacctagcacggtgagccgtgtccctggcccgaagaactgctcattgtgtcgacaagtaacggattgcagtcactgctggcacagaggtacatagatgtctggttggtgctggcggactccagaatcagggagaagcgctccttcttctctctagagacactgtacccctcaggaatatctcctttttctttcattttaacatcatatgagaaatagatcagccgtagccccagacctgggtcttgtcgataccagaacatattttcatggtccatatcctggacacattccagaaaaactttctctcccgtccttttgactagatatctcgagctctgggttactttcacatctacgaggcctgtgagagacaagtaacggattgcagctgagcgggctggcaaggc

SEQ ID NO: 814 - DNA, 495 bp, Artificial Sequence
  source: /note="Description of Artificial Sequence: Synthetic polynucleotide"
gcctccctcgcgccatcaggtctcctagattgcagcctctgcccatcccgccctctcggagctctccggagccccaaccgcctccttacccagtacggtcagcctagagccttctccaaaaaacagctccccggtgtcgacgtctcctagattgcagtcactgctggcacagaggtacatagatgtctggttggtgctggcggactccagaatcagggagaagcgctccttcttctctctagagacactgtacccctcaggaatatctcctttttctttcattttaacatcatatgagaaatagatcagccgtagccccagacctgggtcttgtcgataccagaacatattttcatggtccatatcctggacacattccagaaaaactttctctcccgtccttttgactagatatctcgagctctgggttactttcacatctacgaggcctgtgagagacgtctcctagattgcagctgagcgggctggcaaggc

SEQ ID NO: 815 - DNA, 495 bp, Artificial Sequence
  source: /note="Description of Artificial Sequence: Synthetic polynucleotide"
gcctccctcgcgccatcaggtagacacgattgcaggcgtcccggggcgccccctccccagttccggggcttcagcgggagcccccgcttaccgagcactgtcagccgggtgcctgggccaaaatactgcgtatctgtcgacgtagacacgattgcagtcactgctggcacagaggtacatagatgtctggttggtgctggcggactccagaatcagggagaagcgctccttcttctctctagagacactgtacccctcaggaatatctcctttttctttcattttaacatcatatgagaaatagatcagccgtagccccagacctgggtcttgtcgataccagaacatattttcatggtccatatcctggacacattccagaaaaactttctctcccgtccttttgactagatatctcgagctctgggttactttcacatctacgaggcctgtgagagacgtagacacgattgcagctgagcgggctggcaaggc

SEQ ID NO: 816 - DNA, 495 bp, Artificial Sequence
  source: /note="Description of Artificial Sequence: Synthetic polynucleotide"
gcctccctcgcgccatcagcactgtacgattgcagcgcacaaaaacccgagcgcagtctcgtccccggtcccccggcggccccagcttacccagcactgagagccgggtcccggcgccgaagtactgaatgttttgtcgaccactgtacgattgcagtcactgctggcacagaggtacatagatgtctggttggtgctggcggactccagaatcagggagaagcgctccttcttctctctagagacactgtacccctcaggaatatctcctttttctttcattttaacatcatatgagaaatagatcagccgtagccccagacctgggtcttgtcgataccagaacatattttcatggtccatatcctggacacattccagaaaaactttctctcccgtccttttgactagatatctcgagctctgggttactttcacatctacgaggcctgtgagagaccactgtacgattgcagctgagcgggctggcaaggc

SEQ ID NO: 817 - DNA, 495 bp, Artificial Sequence
  source: /note="Description of Artificial Sequence: Synthetic polynucleotide"
gcctccctcgcgccatcaggatgatccgattgcagccccgcaaaaaccagacccaagccgcccgcgcccgcgccccagcagcccgcgctcaccgagcaccaggagccgcgtgcctggcccgaagtactgggtctcgtcgacgatgatccgattgcagtcactgctggcacagaggtacatagatgtctggttggtgctggcggactccagaatcagggagaagcgctccttcttctctctagagacactgtacccctcaggaatatctcctttttctttcattttaacatcatatgagaaatagatcagccgtagccccagacctgggtcttgtcgataccagaacatattttcatggtccatatcctggacacattccagaaaaactttctctcccgtccttttgactagatatctcgagctctgggttactttcacatctacgaggcctgtgagagacgatgatccgattgcagctgagcgggctggcaaggc

SEQ ID NO: 818 - DNA, 495 bp, Artificial Sequence
  source: /note="Description of Artificial Sequence: Synthetic polynucleotide"
gcctccctcgcgccatcagcgccaatagattgcagccgccgccttccacctgaatcccgccgcccgggtggtcccgcgaaaactcacccagcacggtcagcctgctgccggccccgaaagtcaggacgttggcccgtcgaccgccaatagattgcagtcactgctggcacagaggtacatagatgtctggttggtgctggcggactccagaatcagggagaagcgctccttcttctctctagagacactgtacccctcaggaatatctcctttttctttcattttaacatcatatgagaaatagatcagccgtagccccagacctgggtcttgtcgataccagaacatattttcatggtccatatcctggacacattccagaaaaactttctctcccgtccttttgactagatatctcgagctctgggttactttcacatctacgaggcctgtgagagaccgccaatagattgcagctgagcgggctggcaaggc

SEQ ID NO: 819 - DNA, 495 bp, Artificial Sequence
  source: /note="Description of Artificial Sequence: Synthetic polynucleotide"
gcctccctcgcgccatcagtcaagcctgattgcagccaccctccgactccggggaccgaggggctggaaggtggggagacgcccgaatctcacctgtgaccgtgagcctggtgcccggcccgaagtactgctcgtgtcgactcaagcctgattgcagtcactgctggcacagaggtacatagatgtctggttggtgctggcggactccagaatcagggagaagcgctccttcttctctctagagacactgtacccctcaggaatatctcctttttctttcattttaacatcatatgagaaatagatcagccgtagccccagacctgggtcttgtcgataccagaacatattttcatggtccatatcctggacacattccagaaaaactttctctcccgtccttttgactagatatctcgagctctgggttactttcacatctacgaggcctgtgagagactcaagcctgattgcagctgagcgggctggcaaggc

SEQ ID NO: 820 - DNA, 495 bp, Artificial Sequence
  source: /note="Description of Artificial Sequence: Synthetic polynucleotide"
gcctccctcgcgccatcagagagtgtcactatgacctgtggacccacttttccctgtgacggatctgcaaaagaacctgaaaaatgtcttacctacaactgtgagtctggtgccttgtccaaagaaagcttcagtgtcgacagagtgtcactatgactcaacgctgcagagatatatgctgctgtcttcagggctcatgttgctcacagtcagagttgagaatgttaggtttgggcggctgatgggaaacttgtcaatgacaaatccactctcatatgtggcctcagagccctgatttgcagttgcgatcagtgtcaggctctgtccaggttgctgacggtaccagaacatcatggtgacttggctatcgacttgacactggatcgtcagggaggttccacgttgacagatatccctgcttggcttttgagagatgacagcactgaacacagagcctagtagagtgtcactatgacctgagcgggctggcaaggc

SEQ ID NO: 821 - DNA, 495 bp, Artificial Sequence
  source: /note="Description of Artificial Sequence: Synthetic polynucleotide"
gcctccctcgcgccatcaggttccgaaactatgacatttcccaggacagagtcctccctcatcgcacccctcctagagacccccagccttacctacaacggttaacctggtccccgaaccgaaggtgtagccatagtcgacgttccgaaactatgactcaacgctgcagagatatatgctgctgtcttcagggctcatgttgctcacagtcagagttgagaatgttaggtttgggcggctgatgggaaacttgtcaatgacaaatccactctcatatgtggcctcagagccctgatttgcagttgcgatcagtgtcaggctctgtccaggttgctgacggtaccagaacatcatggtgacttggctatcgacttgacactggatcgtcagggaggttccacgttgacagatatccctgcttggcttttgagagatgacagcactgaacacagagcctagtgttccgaaactatgacctgagcgggctggcaaggc

SEQ ID NO: 822 - DNA, 495 bp, Artificial Sequence
  source: /note="Description of Artificial Sequence: Synthetic polynucleotide"
gcctccctcgcgccatcagcgttacttactatgacctggattccagcccctttttgcaagttcccagctgtccagccttgacttactcacctacaacagtgagccaacttccctctccaaaatatatggtgtttcgtcgaccgttacttactatgactcaacgctgcagagatatatgctgctgtcttcagggctcatgttgctcacagtcagagttgagaatgttaggtttgggcggctgatgggaaacttgtcaatgacaaatccactctcatatgtggcctcagagccctgatttgcagttgcgatcagtgtcaggctctgtccaggttgctgacggtaccagaacatcatggtgacttggctatcgacttgacactggatcgtcagggaggttccacgttgacagatatccctgcttggcttttgagagatgacagcactgaacacagagcctagtcgttacttactatgacctgagcgggctggcaaggc

SEQ ID NO: 823 - DNA, 495 bp, Artificial Sequence
  source: /note="Description of Artificial Sequence: Synthetic polynucleotide"
gcctccctcgcgccatcagtaggagacactatgacctcctggaactccgaccttatgatacactatcccgaaagaagtcttttacatacccaagacagagagctgggttccactgccaaaaaacagtttttcattgtcgactaggagacactatgactcaacgctgcagagatatatgctgctgtcttcagggctcatgttgctcacagtcagagttgagaatgttaggtttgggcggctgatgggaaacttgtcaatgacaaatccactctcatatgtggcctcagagccctgatttgcagttgcgatcagtgtcaggctctgtccaggttgctgacggtaccagaacatcatggtgacttggctatcgacttgacactggatcgtcagggaggttccacgttgacagatatccctgcttggcttttgagagatgacagcactgaacacagagcctagttaggagacactatgacctgagcgggctggcaaggc

SEQ ID NO: 824 - DNA, 495 bp, Artificial Sequence
  source: /note="Description of Artificial Sequence: Synthetic polynucleotide"
gcctccctcgcgccatcaggacactctactatgacagagaactctgccttcaagggacaatggccataccaccctgattctgcaacttacctaggatggagagtcgagtcccatcaccaaaatgctggggctgatgtcgacgacactctactatgactcaacgctgcagagatatatgctgctgtcttcagggctcatgttgctcacagtcagagttgagaatgttaggtttgggcggctgatgggaaacttgtcaatgacaaatccactctcatatgtggcctcagagccctgatttgcagttgcgatcagtgtcaggctctgtccaggttgctgacggtaccagaacatcatggtgacttggctatcgacttgacactggatcgtcagggaggttccacgttgacagatatccctgcttggcttttgagagatgacagcactgaacacagagcctagtgacactctactatgacctgagcgggctggcaaggc

SEQ ID NO: 825 - DNA, 495 bp, Artificial Sequence
  source: /note="Description of Artificial Sequence: Synthetic polynucleotide"
gcctccctcgcgccatcagttcggaacactatgacatcattgcagtcaaacccaggcacccccgagtcaagagtggagcccccatacctgtcacagtgagcctggtcccgttcccaaagtggaggggtgaattatgtcgacttcggaacactatgactcaacgctgcagagatatatgctgctgtcttcagggctcatgttgctcacagtcagagttgagaatgttaggtttgggcggctgatgggaaacttgtcaatgacaaatccactctcatatgtggcctcagagccctgatttgcagttgcgatcagtgtcaggctctgtccaggttgctgacggtaccagaacatcatggtgacttggctatcgacttgacactggatcgtcagggaggttccacgttgacagatatccctgcttggcttttgagagatgacagcactgaacacagagcctagtttcggaacactatgacctgagcgggctggcaaggc

SEQ ID NO: 826 - DNA, 495 bp, Artificial Sequence
  source: /note="Description of Artificial Sequence: Synthetic polynucleotide"
gcctccctcgcgccatcagaagtaacgactatgacgggtcgtgcaggctgggctgctcaccctctctcccacctggagcccccttcttacctagcacggtgagccgtgtccctggcccgaagaactgctcattgtgtcgacaagtaacgactatgactcaacgctgcagagatatatgctgctgtcttcagggctcatgttgctcacagtcagagttgagaatgttaggtttgggcggctgatgggaaacttgtcaatgacaaatccactctcatatgtggcctcagagccctgatttgcagttgcgatcagtgtcaggctctgtccaggttgctgacggtaccagaacatcatggtgacttggctatcgacttgacactggatcgtcagggaggttccacgttgacagatatccctgcttggcttttgagagatgacagcactgaacacagagcctagtaagtaacgactatgacctgagcgggctggcaaggc

SEQ ID NO: 827 - DNA, 495 bp, Artificial Sequence
  source: /note="Description of Artificial Sequence: Synthetic polynucleotide"
gcctccctcgcgccatcaggtctcctaactatgaccctctgcccatcccgccctctcggagctctccggagccccaaccgcctccttacccagtacggtcagcctagagccttctccaaaaaacagctccccggtgtcgacgtctcctaactatgactcaacgctgcagagatatatgctgctgtcttcagggctcatgttgctcacagtcagagttgagaatgttaggtttgggcggctgatgggaaacttgtcaatgacaaatccactctcatatgtggcctcagagccctgatttgcagttgcgatcagtgtcaggctctgtccaggttgctgacggtaccagaacatcatggtgacttggctatcgacttgacactggatcgtcagggaggttccacgttgacagatatccctgcttggcttttgagagatgacagcactgaacacagagcctagtgtctcctaactatgacctgagcgggctggcaaggc

SEQ ID NO: 828 - DNA, 495 bp, Artificial Sequence
  source: /note="Description of Artificial Sequence: Synthetic polynucleotide"
gcctccctcgcgccatcaggtagacacactatgacgcgtcccggggcgccccctccccagttccggggcttcagcgggagcccccgcttaccgagcactgtcagccgggtgcctgggccaaaatactgcgtatctgtcgacgtagacacactatgactcaacgctgcagagatatatgctgctgtcttcagggctcatgttgctcacagtcagagttgagaatgttaggtttgggcggctgatgggaaacttgtcaatgacaaatccactctcatatgtggcctcagagccctgatttgcagttgcgatcagtgtcaggctctgtccaggttgctgacggtaccagaacatcatggtgacttggctatcgacttgacactggatcgtcagggaggttccacgttgacagatatccctgcttggcttttgagagatgacagcactgaacacagagcctagtgtagacacactatgacctgagcgggctggcaaggc

SEQ ID NO: 829 - DNA, 495 bp, Artificial Sequence
  source: /note="Description of Artificial Sequence: Synthetic polynucleotide"
gcctccctcgcgccatcagcactgtacactatgaccgcacaaaaacccgagcgcagtctcgtccccggtcccccggcggccccagcttacccagcactgagagccgggtcccggcgccgaagtactgaatgttttgtcgaccactgtacactatgactcaacgctgcagagatatatgctgctgtcttcagggctcatgttgctcacagtcagagttgagaatgttaggtttgggcggctgatgggaaacttgtcaatgacaaatccactctcatatgtggcctcagagccctgatttgcagttgcgatcagtgtcaggctctgtccaggttgctgacggtaccagaacatcatggtgacttggctatcgacttgacactggatcgtcagggaggttccacgttgacagatatccctgcttggcttttgagagatgacagcactgaacacagagcctagtcactgtacactatgacctgagcgggctggcaaggc

SEQ ID NO: 830 - DNA, 495 bp, Artificial Sequence
  source: /note="Description of Artificial Sequence: Synthetic polynucleotide"
gcctccctcgcgccatcaggatgatccactatgacccccgcaaaaaccagacccaagccgcccgcgcccgcgccccagcagcccgcgctcaccgagcaccaggagccgcgtgcctggcccgaagtactgggtctcgtcgacgatgatccactatgactcaacgctgcagagatatatgctgctgtcttcagggctcatgttgctcacagtcagagttgagaatgttaggtttgggcggctgatgggaaacttgtcaatgacaaatccactctcatatgtggcctcagagccctgatttgcagttgcgatcagtgtcaggctctgtccaggttgctgacggtaccagaacatcatggtgacttggctatcgacttgacactggatcgtcagggaggttccacgttgacagatatccctgcttggcttttgagagatgacagcactgaacacagagcctagtgatgatccactatgacctgagcgggctggcaaggc

SEQ ID NO: 831 - DNA, 495 bp, Artificial Sequence
  source: /note="Description of Artificial Sequence: Synthetic polynucleotide"
gcctccctcgcgccatcagcgccaataactatgacccgccgccttccacctgaatcccgccgcccgggtggtcccgcgaaaactcacccagcacggtcagcctgctgccggccccgaaagtcaggacgttggcccgtcgaccgccaataactatgactcaacgctgcagagatatatgctgctgtcttcagggctcatgttgctcacagtcagagttgagaatgttaggtttgggcggctgatgggaaacttgtcaatgacaaatccactctcatatgtggcctcagagccctgatttgcagttgcgatcagtgtcaggctctgtccaggttgctgacggtaccagaacatcatggtgacttggctatcgacttgacactggatcgtcagggaggttccacgttgacagatatccctgcttggcttttgagagatgacagcactgaacacagagcctagtcgccaataactatgacctgagcgggctggcaaggc

SEQ ID NO: 832 - DNA, 495 bp, Artificial Sequence
  source: /note="Description of Artificial Sequence: Synthetic polynucleotide"
gcctccctcgcgccatcagtcaagcctactatgacccaccctccgactccggggaccgaggggctggaaggtggggagacgcccgaatctcacctgtgaccgtgagcctggtgcccggcccgaagtactgctcgtgtcgactcaagcctactatgactcaacgctgcagagatatatgctgctgtcttcagggctcatgttgctcacagtcagagttgagaatgttaggtttgggcggctgatgggaaacttgtcaatgacaaatccactctcatatgtggcctcagagccctgatttgcagttgcgatcagtgtcaggctctgtccaggttgctgacggtaccagaacatcatggtgacttggctatcgacttgacactggatcgtcagggaggttccacgttgacagatatccctgcttggcttttgagagatgacagcactgaacacagagcctagttcaagcctactatgacctgagcgggctggcaaggc

SEQ ID NO: 833 - DNA, 495 bp, Artificial Sequence
  source: /note="Description of Artificial Sequence: Synthetic polynucleotide"
gcctccctcgcgccatcagagagtgtctccatgtgctgtggacccacttttccctgtgacggatctgcaaaagaacctgaaaaatgtcttacctacaactgtgagtctggtgccttgtccaaagaaagcttcagtgtcgacagagtgtctccatgtgtcacaggcacagagatagaagccagagtcactgagaaggagcttcttagaactcaggatgaactgccggtcctggggtctggaggctgagagattctggggcacctcagagctgatctggccaataccaacggagtagaagagcagctggaggcccctgcctgcagcctgtcggtaccagtataggttggggtttgatgttccctccacagtgcactccagagagagcgggctgcccacaggctgcaccagggtcgctggccattgatgaatagtctgagatctgacccctgtgggaaagataagagtgtctccatgtgctgagcgggctggcaaggc

SEQ ID NO: 834 - DNA, 495 bp, Artificial Sequence
  source: /note="Description of Artificial Sequence: Synthetic polynucleotide"
gcctccctcgcgccatcaggttccgaatccatgtgatttcccaggacagagtcctccctcatcgcacccctcctagagacccccagccttacctacaacggttaacctggtccccgaaccgaaggtgtagccatagtcgacgttccgaatccatgtgtcacaggcacagagatagaagccagagtcactgagaaggagcttcttagaactcaggatgaactgccggtcctggggtctggaggctgagagattctggggcacctcagagctgatctggccaataccaacggagtagaagagcagctggaggcccctgcctgcagcctgtcggtaccagtataggttggggtttgatgttccctccacagtgcactccagagagagcgggctgcccacaggctgcaccagggtcgctggccattgatgaatagtctgagatctgacccctgtgggaaagatagttccgaatccatgtgctgagcgggctggcaaggc

SEQ ID NO: 835 - DNA, 495 bp, Artificial Sequence
  source: /note="Description of Artificial Sequence: Synthetic polynucleotide"
gcctccctcgcgccatcagcgttactttccatgtgctggattccagcccctttttgcaagttcccagctgtccagccttgacttactcacctacaacagtgagccaacttccctctccaaaatatatggtgtttcgtcgaccgttactttccatgtgtcacaggcacagagatagaagccagagtcactgagaaggagcttcttagaactcaggatgaactgccggtcctggggtctggaggctgagagattctggggcacctcagagctgatctggccaataccaacggagtagaagagcagctggaggcccctgcctgcagcctgtcggtaccagtataggttggggtttgatgttccctccacagtgcactccagagagagcgggctgcccacaggctgcaccagggtcgctggccattgatgaatagtctgagatctgacccctgtgggaaagatacgttactttccatgtgctgagcgggctggcaaggc

SEQ ID NO: 836 - DNA, 495 bp, Artificial Sequence
  source: /note="Description of Artificial Sequence: Synthetic polynucleotide"
gcctccctcgcgccatcagtaggagactccatgtgctcctggaactccgaccttatgatacactatcccgaaagaagtcttttacatacccaagacagagagctgggttccactgccaaaaaacagtttttcattgtcgactaggagactccatgtgtcacaggcacagagatagaagccagagtcactgagaaggagcttcttagaactcaggatgaactgccggtcctggggtctggaggctgagagattctggggcacctcagagctgatctggccaataccaacggagtagaagagcagctggaggcccctgcctgcagcctgtcggtaccagtataggttggggtttgatgttccctccacagtgcactccagagagagcgggctgcccacaggctgcaccagggtcgctggccattgatgaatagtctgagatctgacccctgtgggaaagatataggagactccatgtgctgagcgggctggcaaggc

SEQ ID NO: 837 - DNA, 495 bp, Artificial Sequence
  source: /note="Description of Artificial Sequence: Synthetic polynucleotide"
gcctccctcgcgccatcaggacactcttccatgtgagagaactctgccttcaagggacaatggccataccaccctgattctgcaacttacctaggatggagagtcgagtcccatcaccaaaatgctggggctgatgtcgacgacactcttccatgtgtcacaggcacagagatagaagccagagtcactgagaaggagcttcttagaactcaggatgaactgccggtcctggggtctggaggctgagagattctggggcacctcagagctgatctggccaataccaacggagtagaagagcagctggaggcccctgcctgcagcctgtcggtaccagtataggttggggtttgatgttccctccacagtgcactccagagagagcgggctgcccacaggctgcaccagggtcgctggccattgatgaatagtctgagatctgacccctgtgggaaagatagacactcttccatgtgctgagcgggctggcaaggc

SEQ ID NO: 838 - DNA, 495 bp, Artificial Sequence
  source: /note="Description of Artificial Sequence: Synthetic polynucleotide"
gcctccctcgcgccatcagttcggaactccatgtgatcattgcagtcaaacccaggcacccccgagtcaagagtggagcccccatacctgtcacagtgagcctggtcccgttcccaaagtggaggggtgaattatgtcgacttcggaactccatgtgtcacaggcacagagatagaagccagagtcactgagaaggagcttcttagaactcaggatgaactgccggtcctggggtctggaggctgagagattctggggcacctcagagctgatctggccaataccaacggagtagaagagcagctggaggcccctgcctgcagcctgtcggtaccagtataggttggggtttgatgttccctccacagtgcactccagagagagcgggctgcccacaggctgcaccagggtcgctggccattgatgaatagtctgagatctgacccctgtgggaaagatattcggaactccatgtgctgagcgggctggcaaggc

SEQ ID NO: 839 - DNA, 495 bp, Artificial Sequence
  source: /note="Description of Artificial Sequence: Synthetic polynucleotide"
gcctccctcgcgccatcagaagtaacgtccatgtggggtcgtgcaggctgggctgctcaccctctctcccacctggagcccccttcttacctagcacggtgagccgtgtccctggcccgaagaactgctcattgtgtcgacaagtaacgtccatgtgtcacaggcacagagatagaagccagagtcactgagaaggagcttcttagaactcaggatgaactgccggtcctggggtctggaggctgagagattctggggcacctcagagctgatctggccaataccaacggagtagaagagcagctggaggcccctgcctgcagcctgtcggtaccagtataggttggggtttgatgttccctccacagtgcactccagagagagcgggctgcccacaggctgcaccagggtcgctggccattgatgaatagtctgagatctgacccctgtgggaaagataaagtaacgtccatgtgctgagcgggctggcaaggc

SEQ ID NO: 840 - DNA, 495 bp, Artificial Sequence
  source: /note="Description of Artificial Sequence: Synthetic polynucleotide"
gcctccctcgcgccatcaggtctcctatccatgtgcctctgcccatcccgccctctcggagctctccggagccccaaccgcctccttacccagtacggtcagcctagagccttctccaaaaaacagctccccggtgtcgacgtctcctatccatgtgtcacaggcacagagatagaagccagagtcactgagaaggagcttcttagaactcaggatgaactgccggtcctggggtctggaggctgagagattctggggcacctcagagctgatctggccaataccaacggagtagaagagcagctggaggcccctgcctgcagcctgtcggtaccagtataggttggggtttgatgttccctccacagtgcactccagagagagcgggctgcccacaggctgcaccagggtcgctggccattgatgaatagtctgagatctgacccctgtgggaaagatagtctcctatccatgtgctgagcgggctggcaaggc

SEQ ID NO: 841 - DNA, 495 bp, Artificial Sequence
  source: /note="Description of Artificial Sequence: Synthetic polynucleotide"
gcctccctcgcgccatcaggtagacactccatgtggcgtcccggggcgccccctccccagttccggggcttcagcgggagcccccgcttaccgagcactgtcagccgggtgcctgggccaaaatactgcgtatctgtcgacgtagacactccatgtgtcacaggcacagagatagaagccagagtcactgagaaggagcttcttagaactcaggatgaactgccggtcctggggtctggaggctgagagattctggggcacctcagagctgatctggccaataccaacggagtagaagagcagctggaggcccctgcctgcagcctgtcggtaccagtataggttggggtttgatgttccctccacagtgcactccagagagagcgggctgcccacaggctgcaccagggtcgctggccattgatgaatagtctgagatctgacccctgtgggaaagatagtagacactccatgtgctgagcgggctggcaaggc

SEQ ID NO: 842 - DNA, 495 bp, Artificial Sequence
  source: /note="Description of Artificial Sequence: Synthetic polynucleotide"
gcctccctcgcgccatcagcactgtactccatgtgcgcacaaaaacccgagcgcagtctcgtccccggtcccccggcggccccagcttacccagcactgagagccgggtcccggcgccgaagtactgaatgttttgtcgaccactgtactccatgtgtcacaggcacagagatagaagccagagtcactgagaaggagcttcttagaactcaggatgaactgccggtcctggggtctggaggctgagagattctggggcacctcagagctgatctggccaataccaacggagtagaagagcagctggaggcccctgcctgcagcctgtcggtaccagtataggttggggtttgatgttccctccacagtgcactccagagagagcgggctgcccacaggctgcaccagggtcgctggccattgatgaatagtctgagatctgacccctgtgggaaagatacactgtactccatgtgctgagcgggctggcaaggc

SEQ ID NO: 843 - DNA, 495 bp, Artificial Sequence
  source: /note="Description of Artificial Sequence: Synthetic polynucleotide"
gcctccctcgcgccatcaggatgatcctccatgtgccccgcaaaaaccagacccaagccgcccgcgcccgcgccccagcagcccgcgctcaccgagcaccaggagccgcgtgcctggcccgaagtactgggtctcgtcgacgatgatcctccatgtgtcacaggcacagagatagaagccagagtcactgagaaggagcttcttagaactcaggatgaactgccggtcctggggtctggaggctgagagattctggggcacctcagagctgatctggccaataccaacggagtagaagagcagctggaggcccctgcctgcagcctgtcggtaccagtataggttggggtttgatgttccctccacagtgcactccagagagagcgggctgcccacaggctgcaccagggtcgctggccattgatgaatagtctgagatctgacccctgtgggaaagatagatgatcctccatgtgctgagcgggctggcaaggc

SEQ ID NO: 844 - DNA, 495 bp, Artificial Sequence
  source: /note="Description of Artificial Sequence: Synthetic polynucleotide"
gcctccctcgcgccatcagcgccaatatccatgtgccgccgccttccacctgaatcccgccgcccgggtggtcccgcgaaaactcacccagcacggtcagcctgctgccggccccgaaagtcaggacgttggcccgtcgaccgccaatatccatgtgtcacaggcacagagatagaagccagagtcactgagaaggagcttcttagaactcaggatgaactgccggtcctggggtctggaggctgagagattctggggcacctcagagctgatctggccaataccaacggagtagaagagcagctggaggcccctgcctgcagcctgtcggtaccagtataggttggggtttgatgttccctccacagtgcactccagagagagcgggctgcccacaggctgcaccagggtcgctggccattgatgaatagtctgagatctgacccctgtgggaaagatacgccaatatccatgtgctgagcgggctggcaaggc

SEQ ID NO: 845 - DNA, 495 bp, Artificial Sequence
  source: /note="Description of Artificial Sequence: Synthetic polynucleotide"
gcctccctcgcgccatcagtcaagccttccatgtgccaccctccgactccggggaccgaggggctggaaggtggggagacgcccgaatctcacctgtgaccgtgagcctggtgcccggcccgaagtactgctcgtgtcgactcaagccttccatgtgtcacaggcacagagatagaagccagagtcactgagaaggagcttcttagaactcaggatgaactgccggtcctggggtctggaggctgagagattctggggcacctcagagctgatctggccaataccaacggagtagaagagcagctggaggcccctgcctgcagcctgtcggtaccagtataggttggggtttgatgttccctccacagtgcactccagagagagcgggctgcccacaggctgcaccagggtcgctggccattgatgaatagtctgagatctgacccctgtgggaaagatatcaagccttccatgtgctgagcgggctggcaaggc

SEQ ID NO: 846 - DNA, 495 bp, Artificial Sequence
  source: /note="Description of Artificial Sequence: Synthetic polynucleotide"
gcctccctcgcgccatcagagagtgtcatggtcaactgtggacccacttttccctgtgacggatctgcaaaagaacctgaaaaatgtcttacctacaactgtgagtctggtgccttgtccaaagaaagcttcagtgtcgacagagtgtcatggtcaatcacggtacaaggacacagggacacctgaaagggagttgcagatttcagagccaaagagaacttctattttttgccaggaaatattttcaatagggatatgtctctaatcaacaatgtcaatgttaactgaataatgagtcggctctaattccaaccctgattcttgtgaaaaccagtatgaaatcttggcacttatcttgagaactcctttcctgtctctgcaatcaggtgtcttagagtctaggtggcttcagcttctacgagctggggtttatgagctgaggggacagaagacagaaagaagagtgtcatggtcaactgagcgggctggcaaggc

SEQ ID NO: 847 - DNA, 495 bp, Artificial Sequence
  source: /note="Description of Artificial Sequence: Synthetic polynucleotide"
gcctccctcgcgccatcaggttccgaaatggtcaaatttcccaggacagagtcctccctcatcgcacccctcctagagacccccagccttacctacaacggttaacctggtccccgaaccgaaggtgtagccatagtcgacgttccgaaatggtcaatcacggtacaaggacacagggacacctgaaagggagttgcagatttcagagccaaagagaacttctattttttgccaggaaatattttcaatagggatatgtctctaatcaacaatgtcaatgttaactgaataatgagtcggctctaattccaaccctgattcttgtgaaaaccagtatgaaatcttggcacttatcttgagaactcctttcctgtctctgcaatcaggtgtcttagagtctaggtggcttcagcttctacgagctggggtttatgagctgaggggacagaagacagaaagagttccgaaatggtcaactgagcgggctggcaaggc

SEQ ID NO: 848 - DNA, 495 bp, Artificial Sequence
  source: /note="Description of Artificial Sequence: Synthetic polynucleotide"
gcctccctcgcgccatcagcgttacttatggtcaactggattccagcccctttttgcaagttcccagctgtccagccttgacttactcacctacaacagtgagccaacttccctctccaaaatatatggtgtttcgtcgaccgttacttatggtcaatcacggtacaaggacacagggacacctgaaagggagttgcagatttcagagccaaagagaacttctattttttgccaggaaatattttcaatagggatatgtctctaatcaacaatgtcaatgttaactgaataatgagtcggctctaattccaaccctgattcttgtgaaaaccagtatgaaatcttggcacttatcttgagaactcctttcctgtctctgcaatcaggtgtcttagagtctaggtggcttcagcttctacgagctggggtttatgagctgaggggacagaagacagaaagacgttacttatggtcaactgagcgggctggcaaggc

SEQ ID NO: 849 - DNA, 495 bp, Artificial Sequence
  source: /note="Description of Artificial Sequence: Synthetic polynucleotide"
gcctccctcgcgccatcagtaggagacatggtcaactcctggaactccgaccttatgatacactatcccgaaagaagtcttttacatacccaagacagagagctgggttccactgccaaaaaacagtttttcattgtcgactaggagacatggtcaatcacggtacaaggacacagggacacctgaaagggagttgcagatttcagagccaaagagaacttctattttttgccaggaaatattttcaatagggatatgtctctaatcaacaatgtcaatgttaactgaataatgagtcggctctaattccaaccctgattcttgtgaaaaccagtatgaaatcttggcacttatcttgagaactcctttcctgtctctgcaatcaggtgtcttagagtctaggtggcttcagcttctacgagctggggtttatgagctgaggggacagaagacagaaagataggagacatggtcaactgagcgggctggcaaggc

SEQ ID NO: 850 - DNA, 495 bp, Artificial Sequence
  source: /note="Description of Artificial Sequence: Synthetic polynucleotide"
gcctccctcgcgccatcaggacactctatggtcaaagagaactctgccttcaagggacaatggccataccaccctgattctgcaacttacctaggatggagagtcgagtcccatcaccaaaatgctggggctgatgtcgacgacactctatggtcaatcacggtacaaggacacagggacacctgaaagggagttgcagatttcagagccaaagagaacttctattttttgccaggaaatattttcaatagggatatgtctctaatcaacaatgtcaatgttaactgaataatgagtcggctctaattccaaccctgattcttgtgaaaaccagtatgaaatcttggcacttatcttgagaactcctttcctgtctctgcaatcaggtgtcttagagtctaggtggcttcagcttctacgagctggggtttatgagctgaggggacagaagacagaaagagacactctatggtcaactgagcgggctggcaaggc

SEQ ID NO: 851 - DNA, 495 bp, Artificial Sequence
  source: /note="Description of Artificial Sequence: Synthetic polynucleotide"
gcctccctcgcgccatcagttcggaacatggtcaaatcattgcagtcaaacccaggcacccccgagtcaagagtggagcccccatacctgtcacagtgagcctggtcccgttcccaaagtggaggggtgaattatgtcgacttcggaacatggtcaatcacggtacaaggacacagggacacctgaaagggagttgcagatttcagagccaaagagaacttctattttttgccaggaaatattttcaatagggatatgtctctaatcaacaatgtcaatgttaactgaataatgagtcggctctaattccaaccctgattcttgtgaaaaccagtatgaaatcttggcacttatcttgagaactcctttcctgtctctgcaatcaggtgtcttagagtctaggtggcttcagcttctacgagctggggtttatgagctgaggggacagaagacagaaagattcggaacatggtcaactgagcgggctggcaaggc

SEQ ID NO: 852 - DNA, 495 bp, Artificial Sequence
  source: /note="Description of Artificial Sequence: Synthetic polynucleotide"
gcctccctcgcgccatcagaagtaacgatggtcaagggtcgtgcaggctgggctgctcaccctctctcccacctggagcccccttcttacctagcacggtgagccgtgtccctggcccgaagaactgctcattgtgtcgacaagtaacgatggtcaatcacggtacaaggacacagggacacctgaaagggagttgcagatttcagagccaaagagaacttctattttttgccaggaaatattttcaatagggatatgtctctaatcaacaatgtcaatgttaactgaataatgagtcggctctaattccaaccctgattcttgtgaaaaccagtatgaaatcttggcacttatcttgagaactcctttcctgtctctgcaatcaggtgtcttagagtctaggtggcttcagcttctacgagctggggtttatgagctgaggggacagaagacagaaagaaagtaacgatggtcaactgagcgggctggcaaggc

SEQ ID NO: 853 - DNA, 495 bp, Artificial Sequence
  source: /note="Description of Artificial Sequence: Synthetic polynucleotide"
gcctccctcgcgccatcaggtctcctaatggtcaacctctgcccatcccgccctctcggagctctccggagccccaaccgcctccttacccagtacggtcagcctagagccttctccaaaaaacagctccccggtgtcgacgtctcctaatggtcaatcacggtacaaggacacagggacacctgaaagggagttgcagatttcagagccaaagagaacttctattttttgccaggaaatattttcaatagggatatgtctctaatcaacaatgtcaatgttaactgaataatgagtcggctctaattccaaccctgattcttgtgaaaaccagtatgaaatcttggcacttatcttgagaactcctttcctgtctctgcaatcaggtgtcttagagtctaggtggcttcagcttctacgagctggggtttatgagctgaggggacagaagacagaaagagtctcctaatggtcaactgagcgggctggcaaggc

SEQ ID NO: 854 - DNA, 495 bp, Artificial Sequence
  source: /note="Description of Artificial Sequence: Synthetic polynucleotide"
gcctccctcgcgccatcaggtagacacatggtcaagcgtcccggggcgccccctccccagttccggggcttcagcgggagcccccgcttaccgagcactgtcagccgggtgcctgggccaaaatactgcgtatctgtcgacgtagacacatggtcaatcacggtacaaggacacagggacacctgaaagggagttgcagatttcagagccaaagagaacttctattttttgccaggaaatattttcaatagggatatgtctctaatcaacaatgtcaatgttaactgaataatgagtcggctctaattccaaccctgattcttgtgaaaaccagtatgaaatcttggcacttatcttgagaactcctttcctgtctctgcaatcaggtgtcttagagtctaggtggcttcagcttctacgagctggggtttatgagctgaggggacagaagacagaaagagtagacacatggtcaactgagcgggctggcaaggc

SEQ ID NO: 855 - DNA, 495 bp, Artificial Sequence
  source: /note="Description of Artificial Sequence: Synthetic polynucleotide"
gcctccctcgcgccatcagcactgtacatggtcaacgcacaaaaacccgagcgcagtctcgtccccggtcccccggcggccccagcttacccagcactgagagccgggtcccggcgccgaagtactgaatgttttgtcgaccactgtacatggtcaatcacggtacaaggacacagggacacctgaaagggagttgcagatttcagagccaaagagaacttctattttttgccaggaaatattttcaatagggatatgtctctaatcaacaatgtcaatgttaactgaataatgagtcggctctaattccaaccctgattcttgtgaaaaccagtatgaaatcttggcacttatcttgagaactcctttcctgtctctgcaatcaggtgtcttagagtctaggtggcttcagcttctacgagctggggtttatgagctgaggggacagaagacagaaagacactgtacatggtcaactgagcgggctggcaaggc

SEQ ID NO: 856 - DNA, 495 bp, Artificial Sequence
  source: /note="Description of Artificial Sequence: Synthetic polynucleotide"
gcctccctcgcgccatcaggatgatccatggtcaaccccgcaaaaaccagacccaagccgcccgcgcccgcgccccagcagcccgcgctcaccgagcaccaggagccgcgtgcctggcccgaagtactgggtctcgtcgacgatgatccatggtcaatcacggtacaaggacacagggacacctgaaagggagttgcagatttcagagccaaagagaacttctattttttgccaggaaatattttcaatagggatatgtctctaatcaacaatgtcaatgttaactgaataatgagtcggctctaattccaaccctgattcttgtgaaaaccagtatgaaatcttggcacttatcttgagaactcctttcctgtctctgcaatcaggtgtcttagagtctaggtggcttcagcttctacgagctggggtttatgagctgaggggacagaagacagaaagagatgatccatggtcaactgagcgggctggcaaggc

SEQ ID NO: 857 - DNA, 495 bp, Artificial Sequence
  source: /note="Description of Artificial Sequence: Synthetic polynucleotide"
gcctccctcgcgccatcagcgccaataatggtcaaccgccgccttccacctgaatcccgccgcccgggtggtcccgcgaaaactcacccagcacggtcagcctgctgccggccccgaaagtcaggacgttggcccgtcgaccgccaataatggtcaatcacggtacaaggacacagggacacctgaaagggagttgcagatttcagagccaaagagaacttctattttttgccaggaaatattttcaatagggatatgtctctaatcaacaatgtcaatgttaactgaataatgagtcggctctaattccaaccctgattcttgtgaaaaccagtatgaaatcttggcacttatcttgagaactcctttcctgtctctgcaatcaggtgtcttagagtctaggtggcttcagcttctacgagctggggtttatgagctgaggggacagaagacagaaagacgccaataatggtcaactgagcgggctggcaaggc

SEQ ID NO: 858 - DNA, 495 bp, Artificial Sequence
  source: /note="Description of Artificial Sequence: Synthetic polynucleotide"
gcctccctcgcgccatcagtcaagcctatggtcaaccaccctccgactccggggaccgaggggctggaaggtggggagacgcccgaatctcacctgtgaccgtgagcctggtgcccggcccgaagtactgctcgtgtcgactcaagcctatggtcaatcacggtacaaggacacagggacacctgaaagggagttgcagatttcagagccaaagagaacttctattttttgccaggaaatattttcaatagggatatgtctctaatcaacaatgtcaatgttaactgaataatgagtcggctctaattccaaccctgattcttgtgaaaaccagtatgaaatcttggcacttatcttgagaactcctttcctgtctctgcaatcaggtgtcttagagtctaggtggcttcagcttctacgagctggggtttatgagctgaggggacagaagacagaaagatcaagcctatggtcaactgagcgggctggcaaggc

SEQ ID NO: 859 - DNA, 495 bp, Artificial Sequence
  source: /note="Description of Artificial Sequence: Synthetic polynucleotide"
gcctccctcgcgccatcagagagtgtccaagtcacctgtggacccacttttccctgtgacggatctgcaaaagaacctgaaaaatgtcttacctacaactgtgagtctggtgccttgtccaaagaaagcttcagtgtcgacagagtgtccaagtcactcacatatccgctcagagaggatgtggctgcactgataggctgctgctgcagagggtctcagagtctggttagtgctggacgatttaagggttgggaaagatgattattttttcccttttttctttttggttagaatgactatgctgactcagggcatctttttcaaagctgccaacttcagaagaataattaatagattaaatttatccccagccctggatcttatggattccagaacgtttggtctggttgatagtctgaaaacattccgatacaactttcctgcctcatctcagggtctgagagtgtccaagtcacctgagcgggctggcaaggc

SEQ ID NO: 860 - DNA, 495 bp, Artificial Sequence
  source: /note="Description of Artificial Sequence: Synthetic polynucleotide"
gcctccctcgcgccatcaggttccgaacaagtcacatttcccaggacagagtcctccctcatcgcacccctcctagagacccccagccttacctacaacggttaacctggtccccgaaccgaaggtgtagccatagtcgacgttccgaacaagtcactcacatatccgctcagagaggatgtggctgcactgataggctgctgctgcagagggtctcagagtctggttagtgctggacgatttaagggttgggaaagatgattattttttcccttttttctttttggttagaatgactatgctgactcagggcatctttttcaaagctgccaacttcagaagaataattaatagattaaatttatccccagccctggatcttatggattccagaacgtttggtctggttgatagtctgaaaacattccgatacaactttcctgcctcatctcagggtctggttccgaacaagtcacctgagcgggctggcaaggc

SEQ ID NO: 861 - DNA, 495 bp, Artificial Sequence
  source: /note="Description of Artificial Sequence: Synthetic polynucleotide"
gcctccctcgcgccatcagcgttacttcaagtcacctggattccagcccctttttgcaagttcccagctgtccagccttgacttactcacctacaacagtgagccaacttccctctccaaaatatatggtgtttcgtcgaccgttacttcaagtcactcacatatccgctcagagaggatgtggctgcactgataggctgctgctgcagagggtctcagagtctggttagtgctggacgatttaagggttgggaaagatgattattttttcccttttttctttttggttagaatgactatgctgactcagggcatctttttcaaagctgccaacttcagaagaataattaatagattaaatttatccccagccctggatcttatggattccagaacgtttggtctggttgatagtctgaaaacattccgatacaactttcctgcctcatctcagggtctgcgttacttcaagtcacctgagcgggctggcaaggc

SEQ ID NO: 862 - DNA, 495 bp, Artificial Sequence
  source: /note="Description of Artificial Sequence: Synthetic polynucleotide"
gcctccctcgcgccatcagtaggagaccaagtcacctcctggaactccgaccttatgatacactatcccgaaagaagtcttttacatacccaagacagagagctgggttccactgccaaaaaacagtttttcattgtcgactaggagaccaagtcactcacatatccgctcagagaggatgtggctgcactgataggctgctgctgcagagggtctcagagtctggttagtgctggacgatttaagggttgggaaagatgattattttttcccttttttctttttggttagaatgactatgctgactcagggcatctttttcaaagctgccaacttcagaagaataattaatagattaaatttatccccagccctggatcttatggattccagaacgtttggtctggttgatagtctgaaaacattccgatacaactttcctgcctcatctcagggtctgtaggagaccaagtcacctgagcgggctggcaaggc

SEQ ID NO: 863 - DNA, 495 bp, Artificial Sequence
  source: /note="Description of Artificial Sequence: Synthetic polynucleotide"
gcctccctcgcgccatcaggacactctcaagtcacagagaactctgccttcaagggacaatggccataccaccctgattctgcaacttacctaggatggagagtcgagtcccatcaccaaaatgctggggctgatgtcgacgacactctcaagtcactcacatatccgctcagagaggatgtggctgcactgataggctgctgctgcagagggtctcagagtctggttagtgctggacgatttaagggttgggaaagatgattattttttcccttttttctttttggttagaatgactatgctgactcagggcatctttttcaaagctgccaacttcagaagaataattaatagattaaatttatccccagccctggatcttatggattccagaacgtttggtctggttgatagtctgaaaacattccgatacaactttcctgcctcatctcagggtctggacactctcaagtcacctgagcgggctggcaaggc

SEQ ID NO: 864 - DNA, 495 bp, Artificial Sequence
  source: /note="Description of Artificial Sequence: Synthetic polynucleotide"
gcctccctcgcgccatcagttcggaaccaagtcacatcattgcagtcaaacccaggcacccccgagtcaagagtggagcccccatacctgtcacagtgagcctggtcccgttcccaaagtggaggggtgaattatgtcgacttcggaaccaagtcactcacatatccgctcagagaggatgtggctgcactgataggctgctgctgcagagggtctcagagtctggttagtgctggacgatttaagggttgggaaagatgattattttttcccttttttctttttggttagaatgactatgctgactcagggcatctttttcaaagctgccaacttcagaagaataattaatagattaaatttatccccagccctggatcttatggattccagaacgtttggtctggttgatagtctgaaaacattccgatacaactttcctgcctcatctcagggtctgttcggaaccaagtcacctgagcgggctggcaaggc

SEQ ID NO: 865 - DNA, 495 bp, Artificial Sequence
  source: /note="Description of Artificial Sequence: Synthetic polynucleotide"
gcctccctcgcgccatcagaagtaacgcaagtcacgggtcgtgcaggctgggctgctcaccctctctcccacctggagcccccttcttacctagcacggtgagccgtgtccctggcccgaagaactgctcattgtgtcgacaagtaacgcaagtcactcacatatccgctcagagaggatgtggctgcactgataggctgctgctgcagagggtctcagagtctggttagtgctggacgatttaagggttgggaaagatgattattttttcccttttttctttttggttagaatgactatgctgactcagggcatctttttcaaagctgccaacttcagaagaataattaatagattaaatttatccccagccctggatcttatggattccagaacgtttggtctggttgatagtctgaaaacattccgatacaactttcctgcctcatctcagggtctgaagtaacgcaagtcacctgagcgggctggcaaggc

SEQ ID NO: 866 - DNA, 495 bp, Artificial Sequence
  source: /note="Description of Artificial Sequence: Synthetic polynucleotide"
gcctccctcgcgccatcaggtctcctacaagtcaccctctgcccatcccgccctctcggagctctccggagccccaaccgcctccttacccagtacggtcagcctagagccttctccaaaaaacagctccccggtgtcgacgtctcctacaagtcactcacatatccgctcagagaggatgtggctgcactgataggctgctgctgcagagggtctcagagtctggttagtgctggacgatttaagggttgggaaagatgattattttttcccttttttctttttggttagaatgactatgctgactcagggcatctttttcaaagctgccaacttcagaagaataattaatagattaaatttatccccagccctggatcttatggattccagaacgtttggtctggttgatagtctgaaaacattccgatacaactttcctgcctcatctcagggtctggtctcctacaagtcacctgagcgggctggcaaggc

SEQ ID NO: 867 - DNA, 495 bp, Artificial Sequence
  source: /note="Description of Artificial Sequence: Synthetic polynucleotide"
gcctccctcgcgccatcaggtagacaccaagtcacgcgtcccggggcgccccctccccagttccggggcttcagcgggagcccccgcttaccgagcactgtcagccgggtgcctgggccaaaatactgcgtatctgtcgacgtagacaccaagtcactcacatatccgctcagagaggatgtggctgcactgataggctgctgctgcagagggtctcagagtctggttagtgctggacgatttaagggttgggaaagatgattattttttcccttttttctttttggttagaatgactatgctgactcagggcatctttttcaaagctgccaacttcagaagaataattaatagattaaatttatccccagccctggatcttatggattccagaacgtttggtctggttgatagtctgaaaacattccgatacaactttcctgcctcatctcagggtctggtagacaccaagtcacctgagcgggctggcaaggc

SEQ ID NO: 868 - DNA, 495 bp, Artificial Sequence
  source: /note="Description of Artificial Sequence: Synthetic polynucleotide"
gcctccctcgcgccatcagcactgtaccaagtcaccgcacaaaaacccgagcgcagtctcgtccccggtcccccggcggccccagcttacccagcactgagagccgggtcccggcgccgaagtactgaatgttttgtcgaccactgtaccaagtcactcacatatccgctcagagaggatgtggctgcactgataggctgctgctgcagagggtctcagagtctggttagtgctggacgatttaagggttgggaaagatgattattttttcccttttttctttttggttagaatgactatgctgactcagggcatctttttcaaagctgccaacttcagaagaataattaatagattaaatttatccccagccctggatcttatggattccagaacgtttggtctggttgatagtctgaaaacattccgatacaactttcctgcctcatctcagggtctgcactgtaccaagtcacctgagcgggctggcaaggc

SEQ ID NO: 869 - DNA, 495 bp, Artificial Sequence
  source: /note="Description of Artificial Sequence: Synthetic polynucleotide"
gcctccctcgcgccatcaggatgatcccaagtcacccccgcaaaaaccagacccaagccgcccgcgcccgcgccccagcagcccgcgctcaccgagcaccaggagccgcgtgcctggcccgaagtactgggtctcgtcgacgatgatcccaagtcactcacatatccgctcagagaggatgtggctgcactgataggctgctgctgcagagggtctcagagtctggttagtgctggacgatttaagggttgggaaagatgattattttttcccttttttctttttggttagaatgactatgctgactcagggcatctttttcaaagctgccaacttcagaagaataattaatagattaaatttatccccagccctggatcttatggattccagaacgtttggtctggttgatagtctgaaaacattccgatacaactttcctgcctcatctcagggtctggatgatcccaagtcacctgagcgggctggcaaggc

SEQ ID NO: 870 - DNA, 495 bp, Artificial Sequence
  source: /note="Description of Artificial Sequence: Synthetic polynucleotide"
gcctccctcgcgccatcagcgccaatacaagtcacccgccgccttccacctgaatcccgccgcccgggtggtcccgcgaaaactcacccagcacggtcagcctgctgccggccccgaaagtcaggacgttggcccgtcgaccgccaatacaagtcactcacatatccgctcagagaggatgtggctgcactgataggctgctgctgcagagggtctcagagtctggttagtgctggacgatttaagggttgggaaagatgattattttttcccttttttctttttggttagaatgactatgctgactcagggcatctttttcaaagctgccaacttcagaagaataattaatagattaaatttatccccagccctggatcttatggattccagaacgtttggtctggttgatagtctgaaaacattccgatacaactttcctgcctcatctcagggtctgcgccaatacaagtcacctgagcgggctggcaaggc

SEQ ID NO: 871 - DNA, 495 bp, Artificial Sequence
  source: /note="Description of Artificial Sequence: Synthetic polynucleotide"
gcctccctcgcgccatcagtcaagcctcaagtcacccaccctccgactccggggaccgaggggctggaaggtggggagacgcccgaatctcacctgtgaccgtgagcctggtgcccggcccgaagtactgctcgtgtcgactcaagcctcaagtcactcacatatccgctcagagaggatgtggctgcactgataggctgctgctgcagagggtctcagagtctggttagtgctggacgatttaagggttgggaaagatgattattttttcccttttttctttttggttagaatgactatgctgactcagggcatctttttcaaagctgccaacttcagaagaataattaatagattaaatttatccccagccctggatcttatggattccagaacgtttggtctggttgatagtctgaaaacattccgatacaactttcctgcctcatctcagggtctgtcaagcctcaagtcacctgagcgggctggcaaggc

SEQ ID NO: 872 - DNA, 239 bp, Artificial Sequence
  source: /note="Description of Artificial Sequence: Synthetic polynucleotide"
atgaattcttttataataatgaaatctcagagaagtctgaaatattcgatgatcaattctcagttgaaaggcctgatggatcaaatttcaatccggtccacaaagctggaggactcagccatgtacttctgtgccagcagtcaaggtcagtcgacactgaagctttctttggacaaggcaccagactcacagttgtaggtaagacatttttcaggttcttttgcagatccggcatgcat

SEQ ID NO: 873 - DNA, 239 bp, Artificial Sequence
  source: /note="Description of Artificial Sequence: Synthetic polynucleotide"
atgaattcagctacaataataaggagctcattataaatgaaacagttccaaatcgcttctcacctaaatctccagacaaagctcacttaaatcaattccctggagcttggtgactctgctgtgtatttctgtgccagcagctacgtacggtcgacactgaagctttctttggacaaggcaccagactcacagttgtaggtaagacatttttcaggttcttttgcagatccggcatgcat

SEQ ID NO: 874 - DNA, 239 bp, Artificial Sequence
  source: /note="Description of Artificial Sequence: Synthetic polynucleotide"
atgaattcgtctacagctatgagaaactctctataaatgaaagtgtgccaagtcgcttctcacctgaatgccccaacagctctctcttaactacacgccctgcagccagaagactcagccctgtatctctgcgccagcagctacgcgttgtcgacactgaagctttctttggacaaggcaccagactcacagttgtaggtaagacatttttcaggttcttttgcagatccggcatgcat

SEQ ID NO: 875 - DNA, 239 bp, Artificial Sequence
  source: /note="Description of Artificial Sequence: Synthetic polynucleotide"
atgaattcgtctacaactttaaagaacagactgaaaacaacagtgtgccaagtcgcttctcacctgaatgccccaacagctctcacttatctacacaccctgcagccagaagactcggccctgtatctctgcgccagcagcctcagtgagtcgacactgaagctttctttggacaaggcaccagactcacagttgtaggtaagacatttttcaggttcttttgcagatccggcatgcat

SEQ ID NO: 876 - DNA, 239 bp, Artificial Sequence
  source: /note="Description of Artificial Sequence: Synthetic polynucleotide"
atgaattcgtctacagtcttgaagaacgggttgaaaacaacagtgtgccaagtcgcttctcacctgaatgccccaacagctctcacttatctacacaccctgcagccagaagactcggccctgtatctctgcgccagcagcgtgtctacgtcgacactgaagctttctttggacaaggcaccagactcacagttgtaggtaagacatttttcaggttcttttgcagatccggcatgcat

SEQ ID NO: 877 - DNA, 239 bp, Artificial Sequence
  source: /note="Description of Artificial Sequence: Synthetic polynucleotide"
atgaattctgaatacttcagtgagacacagagaaacaaaggaaacttccctggtcgattctcagggcgccagttctctaactctcgctcttgtgagcaccttggagctgggggactcggccctttatctttgcgccagcagagtaccgagtcgacactgaagctttctttggacaaggcaccagactcacagttgtaggtaagacatttttcaggttcttttgcagatccggcatgcat

SEQ ID NO: 878 - DNA, 239 bp, Artificial Sequence
  source: /note="Description of Artificial Sequence: Synthetic polynucleotide"
atgaattctgaatatgctaatgagttaaggagatcagaaggaaacttccctaatcgattctcagggcgccagttccatgactgttgctcttgtgagtgccttggagctgggggactcggccctgtatctctgtgccagaagttgcctcagtcgacactgaagctttctttggacaaggcaccagactcacagttgtaggtaagacatttttcaggttcttttgcagatccggcatgcat

SEQ ID NO: 879 - DNA, 239 bp, Artificial Sequence
  source: /note="Description of Artificial Sequence: Synthetic polynucleotide"
atgaattctcagtattatagggaggaagagaatggcagaggaaacttccctcctagattctcaggtctccagttccctaattatagctcttgtgaacgccttggagctggacgactcggccctgtatctctgtgccagcagtcgttagcgtcgacactgaagctttctttggacaaggcaccagactcacagttgtaggtaagacatttttcaggttcttttgcagatccggcatgcat

SEQ ID NO: 880 - DNA, 239 bp, Artificial Sequence
  source: /note="Description of Artificial Sequence: Synthetic polynucleotide"
atgaattctcagtattatgagaaagaagagagaggaagaggaaacttccctgatcgattctcagctcgccagttccctaactatagctcttgtgaacgccttgttgctgggggactcggccctgtatctctgtgccagcagtggacatggtcgacactgaagctttctttggacaaggcaccagactcacagttgtaggtaagacatttttcaggttcttttgcagatccggcatgcat

SEQ ID NO: 881 - DNA, 239 bp, Artificial Sequence
  source: /note="Description of Artificial Sequence: Synthetic polynucleotide"
atgaattctcagtattatgaggaggaagagagacagagaggcaacttccctgatcgattctcaggtcaccagttccctaactatagctcttgtgaacgccttgttgctgggggactcggccctctatctctgtgccagcagaggttgctgtcgacactgaagctttctttggacaaggcaccagactcacagttgtaggtaagacatttttcaggttcttttgcagatccggcatgcat

SEQ ID NO: 882 - DNA, 239 bp, Artificial Sequence
  source: /note="Description of Artificial Sequence: Synthetic polynucleotide"
atgaattctcagtattatgagaaagaagagagaggaagaggaaacttccctgatcaattctcaggtcaccagttccctaactatagctcttgtgaacgccttgttgctaggggactcggccctctatctctgtgccagcaggtacagtggtcgacactgaagctttctttggacaaggcaccagactcacagttgtaggtaagacatttttcaggttcttttgcagatccggcatgcat

SEQ ID NO: 883 - DNA, 239 bp, Artificial Sequence
  source: /note="Description of Artificial Sequence: Synthetic polynucleotide"
atgaattcttggtatgacgagggtgaagagagaaacagaggaaacttccctcctagattttcaggtcgccagttccctaattatagctcttgtgaacgccttggagctggaggactcggccctgtatctctgtgccagcagatccatgggtcgacactgaagctttctttggacaaggcaccagactcacagttgtaggtaagacatttttcaggttcttttgcagatccggcatgcat

SEQ ID NO: 884 - DNA, 239 bp, Artificial Sequence
  source: /note="Description of Artificial Sequence: Synthetic polynucleotide"
atgaattctactcagcttctgagggtaccactgacaaaggagaagtccccaatggctacaatgtctccagattaaacaaacgggagttctctggagtcggctgctccctcccagacatctgtgtacttctgtgccagcagttgatgcgagtcgacactgaagctttctttggacaaggcaccagactcacagttgtaggtaagacatttttcaggttcttttgcagatccggcatgcat

SEQ ID NO: 885 - DNA, 239 bp, Artificial Sequence
  source: /note="Description of Artificial Sequence: Synthetic polynucleotide"
atgaattctactcagttggtgagggtacaactgccaaaggagaggtccctgatggctacaatgtctccagattaaaaaaacagaatttccttggagtcggctgctccctcccaaacatctgtgtacttctgtgccagcagtgtagcagtgtcgacactgaagctttctttggacaaggcaccagactcacagttgtaggtaagacatttttcaggttcttttgcagatccggcatgcat

SEQ ID NO: 886 - DNA, 239 bp, Artificial Sequence
  source: /note="Description of Artificial Sequence: Synthetic polynucleotide"
atgaattctactcagttggtgagggtacaactgccaaaggagaggtccctgatggctacaatgtctccagattaaaaaaacagaatttccttggagtcggctgctccctcccaaacatctgtgtacttctgtgccagcagtggatcatcgtcgacactgaagctttctttggacaaggcaccagactcacagttgtaggtaagacatttttcaggttcttttgcagatccggcatgcat

SEQ ID NO: 887 - DNA, 239 bp, Artificial Sequence
  source: /note="Description of Artificial Sequence: Synthetic polynucleotide"
atgaattctattcaaatactgcaggtaccactggcaaaggagaagtccctgatggttatagtgtctccagagcaaacacagatgatttccttggcgtctgctgtaccctctcagacatctgtgtacttctgtgccagcagtgtgaacgtgtcgacactgaagctttctttggacaaggcaccagactcacagttgtaggtaagacatttttcaggttcttttgcagatccggcatgcat

SEQ ID NO: 888 - DNA, 239 bp, Artificial Sequence
  source: /note="Description of Artificial Sequence: Synthetic polynucleotide"
atgaattctactcagttggtgctggtatcactgaccaaggagaagtccccaatggctacaatgtctccagatcaaccacagaggatttccctgctgtcggctgctccctcccagacatctgtgtacttctgtgccagcagttgtcatcggtcgacactgaagctttctttggacaaggcaccagactcacagttgtaggtaagacatttttcaggttcttttgcagatccggcatgcat

SEQ ID NO: 889 - DNA, 239 bp, Artificial Sequence
  source: /note="Description of Artificial Sequence: Synthetic polynucleotide"
atgaattctattcagttggtgctggtatcactgacaaaggagaagtcccgaatggctacaacgtctccagatcaaccacagaggatttccctggagttggctgctccctcccagacatctgtgtacttctgtgccagcagtaggcttgagtcgacactgaagctttctttggacaaggcaccagactcacagttgtaggtaagacatttttcaggttcttttgcagatccggcatgcat

SEQ ID NO: 890 - DNA, 239 bp, Artificial Sequence
  source: /note="Description of Artificial Sequence: Synthetic polynucleotide"
atgaattctactcagttgctgctgctctcactgacaaaggagaagttcccaatggctacaatgtctccagatcaaacacagaggatttccctggagtcagctgctccctctcagacttctgtttacttctgtgccagcagtacacacgtgtcgacactgaagctttctttggacaaggcaccagactcacagttgtaggtaagacatttttcaggttcttttgcagatccggcatgcat

SEQ ID NO: 891 - DNA, 239 bp, Artificial Sequence
  source: /note="Description of Artificial Sequence: Synthetic polynucleotide"
atgaattctactactcagctgctgctggtactactgacaaagaagtccccaatggctacaatgtctctagattaaacacagaggatttccctggtgtcggctgctccctcccagacatctgtgtacttgtgtgccagcagttccacagtgtcgacactgaagctttctttggacaaggcaccagactcacagttgtaggtaagacatttttcaggttcttttgcagatccggcatgcat

SEQ ID NO: 892 - DNA, 239 bp, Artificial Sequence
  source: /note="Description of Artificial Sequence: Synthetic polynucleotide"
atgaattctactcagttgctgctggtatcactgacaaaggagaagtccccgatggctacaatgtatccagatcaaacacagaggatttccctggagtcagctgctccctcccagacatctgtatacttctgtgccagcagtcagtctgtgtcgacactgaagctttctttggacaaggcaccagactcacagttgtaggtaagacatttttcaggttcttttgcagatccggcatgcat

SEQ ID NO: 893 - DNA, 239 bp, Artificial Sequence
  source: /note="Description of Artificial Sequence: Synthetic polynucleotide"
atgaattcttccaaggcaaggatgcagcagacaaatcggggcttccccgtgatcggttctctgcacagaggtctgagggatccatctccattccagcgcacacagcagggggacttggctgtgtatctctgtgccagcagctccatgtggtcgacactgaagctttctttggacaaggcaccagactcacagttgtaggtaagacatttttcaggttcttttgcagatccggcatgcat

SEQ ID NO: 894 - DNA, 239 bp, Artificial Sequence
  source: /note="Description of Artificial Sequence: Synthetic polynucleotide"
atgaattcttccaaggcaacagtgcaccagacaaatcagggctgcccagtgatcgcttctctgcagagaggactgggggatccgtctccaatccagcgcacacagcaggaggactcggccgtgtatctctgtgccagcagctcactgcagtcgacactgaagctttctttggacaaggcaccagactcacagttgtaggtaagacatttttcaggttcttttgcagatccggcatgcat

SEQ ID NO: 895 - DNA, 239 bp, Artificial Sequence
  source: /note="Description of Artificial Sequence: Synthetic polynucleotide"
atgaattcttccaaggcacgggtgcggcagatgactcagggctgcccaacgatcggttctttgcagtcaggcctgagggatccgtctctaatccagcgcacagagcggggggactcagccgtgtatctctgtgccagcagccaagtcacgtcgacactgaagctttctttggacaaggcaccagactcacagttgtaggtaagacatttttcaggttcttttgcagatccggcatgcat

SEQ ID NO: 896 - DNA, 239 bp, Artificial Sequence
  source: /note="Description of Artificial Sequence: Synthetic polynucleotide"
atgaattctcccagagtgatgctcaacgagacaaatcagggcggcccagtggtcggttctctgcagagaggcctgagagatccgtctccaatccagcgcacagagcagggggactcagctgtgtatctctgtgccagcagctagacggagtcgacactgaagctttctttggacaaggcaccagactcacagttgtaggtaagacatttttcaggttcttttgcagatccggcatgcat

SEQ ID NO: 897 - DNA, 239 bp, Artificial Sequence
  source: /note="Description of Artificial Sequence: Synthetic polynucleotide"
atgaattcttcaattatgaagcccaacaagacaaatcagggctgcccaatgatcggttctctgcagagaggcctgagggatccatctccaatccagcgcacagagcagcgggactcggccatgtatcgctgtgccagcagcgagcgatagtcgacactgaagctttctttggacaaggcaccagactcacagttgtaggtaagacatttttcaggttcttttgcagatccggcatgcat

SEQ ID NO: 898 - DNA, 239 bp, Artificial Sequence
  source: /note="Description of Artificial Sequence: Synthetic polynucleotide"
atgaattcttcaattatgaagctcaaccagacaaatcagggctgcccagtgatcggttctctgcagagaggcctgagggatccatctccaattcagcgcacagagcagcgggactcagccatgtatcgctgtgccagcagcctcgagaagtcgacactgaagctttctttggacaaggcaccagactcacagttgtaggtaagacatttttcaggttcttttgcagatccggcatgcat

SEQ ID NO: 899 - DNA, 239 bp, Artificial Sequence
  source: /note="Description of Artificial Sequence: Synthetic polynucleotide"
atgaattcttccagaatgaagctcaactagacaaatcggggctgcccagtgatcgcttctttgcagaaaggcctgagggatccgtctccaatccagcgcacacagcaggaggactccgccgtgtatctctgtgccagcagcatgacaccgtcgacactgaagctttctttggacaaggcaccagactcacagttgtaggtaagacatttttcaggttcttttgcagatccggcatgcat

SEQ ID NO: 900 - DNA, 239 bp, Artificial Sequence
  source: /note="Description of Artificial Sequence: Synthetic polynucleotide"
atgaattcttccagaatgaagctcaactagaaaaatcaaggctgctcagtgatcggttctctgcagagaggcctaagggatctttctccaatccagcgcacagagcagggggactcggccatgtatctctgtgccagcagccttcacgagtcgacactgaagctttctttggacaaggcaccagactcacagttgtaggtaagacatttttcaggttcttttgcagatccggcatgcat

SEQ ID NO: 901 - DNA, 239 bp, Artificial Sequence
  source: /note="Description of Artificial Sequence: Synthetic polynucleotide"
atgaattctcagtattataatggagaagagagagcaaaaggaaacattcttgaacgattctccgcacaacagttccctgacttgcactctcctgagctctctggagctgggggactcagctttgtatttctgtgccagcagcgtagagtgtcgacactgaagctttctttggacaaggcaccagactcacagttgtaggtaagacatttttcaggttcttttgcagatccggcatgcat

SEQ ID NO: 902 - DNA, 239 bp, Artificial Sequence
  source: /note="Description of Artificial Sequence: Synthetic polynucleotide"
atgaattctactcatatggtgttcacgacactaacaaaggagaagtctcagatggctacagtgtctctagatcaaacacagaggacctccctggagtctgctgcctcctcccagacatctgtatatttctgcgccagcagttcgtcgatgtcgacactgaagctttctttggacaaggcaccagactcacagttgtaggtaagacatttttcaggttcttttgcagatccggcatgcat

SEQ ID NO: 903 - DNA, 239 bp, Artificial Sequence
  source: /note="Description of Artificial Sequence: Synthetic polynucleotide"
atgaattctactcagcagctgctgatattacagataaaggagaagtccccgatggctatgttgtctccagatccaagacagagaatttccctggagtcagctacccgctcccagacatctgtgtatttctgcgccagcagtagctagtggtcgacactgaagctttctttggacaaggcaccagactcacagttgtaggtaagacatttttcaggttcttttgcagatccggcatgcat

SEQ ID NO: 904 - DNA, 239 bp, Artificial Sequence
  source: /note="Description of Artificial Sequence: Synthetic polynucleotide"
atgaattctactcatatggtgttaaagatactgacaaaggagaagtctcagatggctatagtgtctctagatcaaagacagaggatttccctggagtccgctaccagctcccagacatctgtgtacttctgtgccatcagttgagacctgtcgacactgaagctttctttggacaaggcaccagactcacagttgtaggtaagacatttttcaggttcttttgcagatccggcatgcat

SEQ ID NO: 905 - DNA, 239 bp, Artificial Sequence
  source: /note="Description of Artificial Sequence: Synthetic polynucleotide"
atgaattctttcaggatgagagtgtagtagatgattcacagttgcctaaggatcgattttctgcagagaggctcaaaggagtagactccaatccagcctgcagagcttggggactcggccatgtatctctgtgccagcagcgatggcttgtcgacactgaagctttctttggacaaggcaccagactcacagttgtaggtaagacatttttcaggttcttttgcagatccggcatgcat

SEQ ID NO: 906 - DNA, 239 bp, Artificial Sequence
  source: /note="Description of Artificial Sequence: Synthetic polynucleotide"
atgaattctttcagaataacggtgtagtggatgattcacagttgcctaaggatcgattttctgcagagaggctcaaaggagtagactccaatccagcctgcaaagcttgaggactcggccgtgtatctctgtgccagcagcgcatctgagtcgacactgaagctttctttggacaaggcaccagactcacagttgtaggtaagacatttttcaggttcttttgcagatccggcatgcat

SEQ ID NO: 907 - DNA, 239 bp, Artificial Sequence
  source: /note="Description of Artificial Sequence: Synthetic polynucleotide"
atgaattctatgagaatgaggaagcagtagacgattcacagttgcctaaggatcgattttctgcagagaggctcaaaggagtagactccaatccagcctgcagagcttggggactcggccgtgtatctctgtgccagcagcgacactctgtcgacactgaagctttctttggacaaggcaccagactcacagttgtaggtaagacatttttcaggttcttttgcagatccggcatgcat

SEQ ID NO: 908 - DNA, 239 bp, Artificial Sequence
  source: /note="Description of Artificial Sequence: Synthetic polynucleotide"
atgaattctttaacaacaacgttccgatagatgattcagggatgcccgaggatcgattctcagctaagatgcctaatgcatcattctccaatccagccctcagaacccagggactcagctgtgtacttctgtgccagcagttgctacacgtcgacactgaagctttctttggacaaggcaccagactcacagttgtaggtaagacatttttcaggttcttttgcagatccggcatgcat

SEQ ID NO: 909 - DNA, 239 bp, Artificial Sequence
  source: /note="Description of Artificial Sequence: Synthetic polynucleotide"
atgaattctttaacaacaacgttccgatagatgattcagggatgcccgaggatcgattctcagctaagatgcctaatgcatcattctccaatccagccctcagaacccagggactcagctgtgtacttctgtgccagcagttcagcttggtcgacactgaagctttctttggacaaggcaccagactcacagttgtaggtaagacatttttcaggttcttttgcagatccggcatgcat

SEQ ID NO: 910 - DNA, 239 bp, Artificial Sequence
  source: /note="Description of Artificial Sequence: Synthetic polynucleotide"
atgaattcttccgcaaccgggctcctctagatgattcggggatgccgaaggatcgattctcagcagagatgcctgatgcaactttagccaatccagccctcagaacccagggactcagctgtgtatttttgtgctagtggtttcggaacgtcgacactgaagctttctttggacaaggcaccagactcacagttgtaggtaagacatttttcaggttcttttgcagatccggcatgcat

SEQ ID NO: 911 - DNA, 239 bp, Artificial Sequence
  source: /note="Description of Artificial Sequence: Synthetic polynucleotide"
atgaattctcgttttatgaaaagatgcagagcgataaaggaagcatccctgatcgattctcagctcaacagttcagtgactatcattctgatgagctccttggagctgggggactcagccctgtacttctgtgccagcagcgcaattcggtcgacactgaagctttctttggacaaggcaccagactcacagttgtaggtaagacatttttcaggttcttttgcagatccggcatgcat

SEQ ID NO: 912 - DNA, 239 bp, Artificial Sequence
  source: /note="Description of Artificial Sequence: Synthetic polynucleotide"
atgaattctttgtgaaagagtctaaacaggatgagtccggtatgcccaacaatcgattcttagctgaaaggactggagggacgtattctagtgcagcctgcagaactggaggattctggagtttatttctgtgccagcagccaagaggtgtcgacactgaagctttctttggacaaggcaccagactcacagttgtaggtaagacatttttcaggttcttttgcagatccggcatgcat

SEQ ID NO: 913 - DNA, 239 bp, Artificial Sequence
  source: /note="Description of Artificial Sequence: Synthetic polynucleotide"
atgaattccactactatgacaaagattttaacaatgaagcagacacccctgataacttccaatccaggaggccgaacacttctttctgctatccgctcaccaggcctgggggacgcagccatgtacctgtgtgccaccagcgaatggacgtcgacactgaagctttctttggacaaggcaccagactcacagttgtaggtaagacatttttcaggttcttttgcagatccggcatgcat

SEQ ID NO: 914 - DNA, 239 bp, Artificial Sequence
  source: /note="Description of Artificial Sequence: Synthetic polynucleotide"
atgaattcttccagaatgaaaatgtctttgatgaaacaggtatgcccaaggaaagattttcagctaagtgcctcccaaattcaccctgtaatccaggctacgaagcttgaggattcagcagtgtatttttgtgccagcagcaactgccagtcgacactgaagctttctttggacaaggcaccagactcacagttgtaggtaagacatttttcaggttcttttgcagatccggcatgcat

SEQ ID NO: 915 - DNA, 239 bp, Artificial Sequence
  source: /note="Description of Artificial Sequence: Synthetic polynucleotide"
atgaattctccttccagtaccaaaacattgcagttgattcagggatgcccaaggaacgattcacagctgaaagacctaacggaacgtcttaagatccatcccgcagagccgagggactcagccgtgtatctctacagtagccctagtaggtcgacactgaagctttctttggacaaggcaccagactcacagttgtaggtaagacatttttcaggttcttttgcagatccggcatgcat

SEQ ID NO: 916 - DNA, 239 bp, Artificial Sequence
  source: /note="Description of Artificial Sequence: Synthetic polynucleotide"
atgaattcctccagaaagaaaatatcatagatgagtcaggaatgccaaaggaacgattttctgctgaatttcccaaagagggccccagcaatccagcaggtagtgcgaggagattcggcagcttatttctgtgccagctcactgacgttgtcgacactgaagctttctttggacaaggcaccagactcacagttgtaggtaagacatttttcaggttcttttgcagatccggcatgcat

SEQ ID NO: 917 - DNA, 239 bp, Artificial Sequence
  source: /note="Description of Artificial Sequence: Synthetic polynucleotide"
atgaattctactcacagatagtaaatgactttcagaaaggagatatagctgaagggtacagcgtctctcgggagaagaaggaatcctttcgtgacatcggcccaaaagaacccgacagctttctatctctgtgccagtagttgcagacagtcgacactgaagctttctttggacaaggcaccagactcacagttgtaggtaagacatttttcaggttcttttgcagatccggcatgcat

SEQ ID NO: 918 - DNA, 239 bp, Artificial Sequence
  source: /note="Description of Artificial Sequence: Synthetic polynucleotide"
atgaattctccaatgagggctccaaggccacatacgagcaaggcgtcgagaaggacaagtttctcatcaaccatgcaagcctgaccttgtacagtgaccagtgcccatcctgaagacagcagcttctacatctgcagtgctagttgaccgtcgacactgaagctttctttggacaaggcaccagactcacagttgtaggtaagacatttttcaggttcttttgcagatccggcatgcat

SEQ ID NO: 919 - DNA, 239 bp, Artificial Sequence
  source: /note="Description of Artificial Sequence: Synthetic polynucleotide"
atgaattcactcctttgatgtcaaagatataaacaaaggagagatctctgatggatacagtgtctctcgacaggcacaggctaaattctctagagtctgccatccccaaccagacagctctttacttctgtgccaccagtggtctcctagtcgacactgaagctttctttggacaaggcaccagactcacagttgtaggtaagacatttttcaggttcttttgcagatccggcatgcat

SEQ ID NO: 920 - DNA, 239 bp, Artificial Sequence
  source: /note="Description of Artificial Sequence: Synthetic polynucleotide"
atgaattctattcctatggagttaattccacagagaagggagatctttcctctgagtcaacagtctccagaataaggacggagcattttcctggagtctgccaggccctcacatacctctcagtacctctgtgccagcagtctgcaatcgtcgacactgaagctttctttggacaaggcaccagactcacagttgtaggtaagacatttttcaggttcttttgcagatccggcatgcat

SEQ ID NO: 921 - DNA, 239 bp, Artificial Sequence
  source: /note="Description of Artificial Sequence: Synthetic polynucleotide"
atgaattctattcaatgaatgttgaggtgactgataagggagatgttcctgaagggtacaaagtctctcgaaaagagaagaggaatttccctggagtcgcccagccccaaccagacctctctgtacttctgtgccagcagttgagcgaagtcgacactgaagctttctttggacaaggcaccagactcacagttgtaggtaagacatttttcaggttcttttgcagatccggcatgcat

SEQ ID NO: 922 - DNA, 239 bp, Artificial Sequence
  source: /note="Description of Artificial Sequence: Synthetic polynucleotide"
atgaattcttctcatatgatgttaaaatgaaagaaaaaggagatattcctgaggggtacagtgtctctagagagaagaaggagcgcttctctggagtccgccagcaccaaccagacatctatgtacctctgtgccagcagtttggactggtcgacactgaagctttctttggacaaggcaccagactcacagttgtaggtaagacatttttcaggttcttttgcagatccggcatgcat

SEQ ID NO: 923 - DNA, 239 bp, Artificial Sequence
  source: /note="Description of Artificial Sequence: Synthetic polynucleotide"
atgaattcgcaaatcagggctctgaggccacatatgagagtggatttgtcattgacaagtttcccatcagccgcccaaacctaacattctactgtgagcaacatgagccctgaagacagcagcatatatctctgcagcgttagcaatccgtcgacactgaagctttctttggacaaggcaccagactcacagttgtaggtaagacatttttcaggttcttttgcagatccggcatgcat

SEQ ID NO: 924 - DNA, 239 bp, Artificial Sequence
  source: /note="Description of Artificial Sequence: Synthetic polynucleotide"
atgaattcctcttctactccgttggtattggccagatcagctctgaggtgccccagaatctctcagcctccagaccccaggaccggcagtagttctaagaagctccttctcagtgactctggcttctatctctgtgcctggcgaactacgtcgacactgaagctttctttggacaaggcaccagactcacagttgtaggtaagacatttttcaggttcttttgcagatccggcatgcat

SEQ ID NO: 925 - DNA, 239 bp, Artificial Sequence
  source: /note="Description of Artificial Sequence: Synthetic polynucleotide"
atgaattcttttataataatgaaatctcagagaagtctgaaatattcgatgatcaattctcagttgaaaggcctgatggatcaaatttcaatccggtccacaaagctggaggactcagccatgtacttctgtgccagcagtcaaggtcagtcgactatggctacaccttcggttcggggaccaggttaaccgttgtaggtaaggctgggggtctctaggaggggtgcgatggcatgcat

SEQ ID NO: 926 - DNA, 239 bp, Artificial Sequence
  source: /note="Description of Artificial Sequence: Synthetic polynucleotide"
atgaattcagctacaataataaggagctcattataaatgaaacagttccaaatcgcttctcacctaaatctccagacaaagctcacttaaatcaattccctggagcttggtgactctgctgtgtatttctgtgccagcagctacgtacggtcgactatggctacaccttcggttcggggaccaggttaaccgttgtaggtaaggctgggggtctctaggaggggtgcgatggcatgcat

SEQ ID NO: 927 - DNA, 239 bp, Artificial Sequence
  source: /note="Description of Artificial Sequence: Synthetic polynucleotide"
atgaattcgtctacagctatgagaaactctctataaatgaaagtgtgccaagtcgcttctcacctgaatgccccaacagctctctcttaactacacgccctgcagccagaagactcagccctgtatctctgcgccagcagctacgcgttgtcgactatggctacaccttcggttcggggaccaggttaaccgttgtaggtaaggctgggggtctctaggaggggtgcgatggcatgcat

SEQ ID NO: 928 - DNA, 239 bp, Artificial Sequence
  source: /note="Description of Artificial Sequence: Synthetic polynucleotide"
atgaattcgtctacaactttaaagaacagactgaaaacaacagtgtgccaagtcgcttctcacctgaatgccccaacagctctcacttatctacacaccctgcagccagaagactcggccctgtatctctgcgccagcagcctcagtgagtcgactatggctacaccttcggttcggggaccaggttaaccgttgtaggtaaggctgggggtctctaggaggggtgcgatggcatgcat

SEQ ID NO: 929 - DNA, 239 bp, Artificial Sequence
  source: /note="Description of Artificial Sequence: Synthetic polynucleotide"
atgaattcgtctacagtcttgaagaacgggttgaaaacaacagtgtgccaagtcgcttctcacctgaatgccccaacagctctcacttatctacacaccctgcagccagaagactcggccctgtatctctgcgccagcagcgtgtctacgtcgactatggctacaccttcggttcggggaccaggttaaccgttgtaggtaaggctgggggtctctaggaggggtgcgatggcatgcat

SEQ ID NO: 930 - DNA, 239 bp, Artificial Sequence
  source: /note="Description of Artificial Sequence: Synthetic polynucleotide"
atgaattctgaatacttcagtgagacacagagaaacaaaggaaacttccctggtcgattctcagggcgccagttctctaactctcgctcttgtgagcaccttggagctgggggactcggccctttatctttgcgccagcagagtaccgagtcgactatggctacaccttcggttcggggaccaggttaaccgttgtaggtaaggctgggggtctctaggaggggtgcgatggcatgcat

SEQ ID NO: 931 - DNA, 239 bp, Artificial Sequence
  source: /note="Description of Artificial Sequence: Synthetic polynucleotide"
atgaattctgaatatgctaatgagttaaggagatcagaaggaaacttccctaatcgattctcagggcgccagttccatgactgttgctcttgtgagtgccttggagctgggggactcggccctgtatctctgtgccagaagttgcctcagtcgactatggctacaccttcggttcggggaccaggttaaccgttgtaggtaaggctgggggtctctaggaggggtgcgatggcatgcat

SEQ ID NO: 932 - DNA, 239 bp, Artificial Sequence
  source: /note="Description of Artificial Sequence: Synthetic polynucleotide"
atgaattctcagtattatagggaggaagagaatggcagaggaaacttccctcctagattctcaggtctccagttccctaattatagctcttgtgaacgccttggagctggacgactcggccctgtatctctgtgccagcagtcgttagcgtcgactatggctacaccttcggttcggggaccaggttaaccgttgtaggtaaggctgggggtctctaggaggggtgcgatggcatgcat

SEQ ID NO: 933 - DNA, 239 bp, Artificial Sequence
  source: /note="Description of Artificial Sequence: Synthetic polynucleotide"
atgaattctcagtattatgagaaagaagagagaggaagaggaaacttccctgatcgattctcagctcgccagttccctaactatagctcttgtgaacgccttgttgctgggggactcggccctgtatctctgtgccagcagtggacatggtcgactatggctacaccttcggttcggggaccaggttaaccgttgtaggtaaggctgggggtctctaggaggggtgcgatggcatgcat

SEQ ID NO: 934 - DNA, 239 bp, Artificial Sequence
  source: /note="Description of Artificial Sequence: Synthetic polynucleotide"
atgaattctcagtattatgaggaggaagagagacagagaggcaacttccctgatcgattctcaggtcaccagttccctaactatagctcttgtgaacgccttgttgctgggggactcggccctctatctctgtgccagcagaggttgctgtcgactatggctacaccttcggttcggggaccaggttaaccgttgtaggtaaggctgggggtctctaggaggggtgcgatggcatgcat

SEQ ID NO: 935 - DNA, 239 bp, Artificial Sequence
  source: /note="Description of Artificial Sequence: Synthetic polynucleotide"
atgaattctcagtattatgagaaagaagagagaggaagaggaaacttccctgatcaattctcaggtcaccagttccctaactatagctcttgtgaacgccttgttgctaggggactcggccctctatctctgtgccagcaggtacagtggtcgactatggctacaccttcggttcggggaccaggttaaccgttgtaggtaaggctgggggtctctaggaggggtgcgatggcatgcat

SEQ ID NO: 936 - DNA, 239 bp, Artificial Sequence
  source: /note="Description of Artificial Sequence: Synthetic polynucleotide"
atgaattcttggtatgacgagggtgaagagagaaacagaggaaacttccctcctagattttcaggtcgccagttccctaattatagctcttgtgaacgccttggagctggaggactcggccctgtatctctgtgccagcagatccatgggtcgactatggctacaccttcggttcggggaccaggttaaccgttgtaggtaaggctgggggtctctaggaggggtgcgatggcatgcat

SEQ ID NO: 937 - DNA, 239 bp, Artificial Sequence
  source: /note="Description of Artificial Sequence: Synthetic polynucleotide"
atgaattctactcagcttctgagggtaccactgacaaaggagaagtccccaatggctacaatgtctccagattaaacaaacgggagttctctggagtcggctgctccctcccagacatctgtgtacttctgtgccagcagttgatgcgagtcgactatggctacaccttcggttcggggaccaggttaaccgttgtaggtaaggctgggggtctctaggaggggtgcgatggcatgcat

SEQ ID NO: 938 - DNA, 239 bp, Artificial Sequence
  source: /note="Description of Artificial Sequence: Synthetic polynucleotide"
atgaattctactcagttggtgagggtacaactgccaaaggagaggtccctgatggctacaatgtctccagattaaaaaaacagaatttccttggagtcggctgctccctcccaaacatctgtgtacttctgtgccagcagtgtagcagtgtcgactatggctacaccttcggttcggggaccaggttaaccgttgtaggtaaggctgggggtctctaggaggggtgcgatggcatgcat

SEQ ID NO: 939 - DNA, 239 bp, Artificial Sequence
  source: /note="Description of Artificial Sequence: Synthetic polynucleotide"
atgaattctactcagttggtgagggtacaactgccaaaggagaggtccctgatggctacaatgtctccagattaaaaaaacagaatttccttggagtcggctgctccctcccaaacatctgtgtacttctgtgccagcagtggatcatcgtcgactatggctacaccttcggttcggggaccaggttaaccgttgtaggtaaggctgggggtctctaggaggggtgcgatggcatgcat

SEQ ID NO: 940 - DNA, 239 bp, Artificial Sequence
  source: /note="Description of Artificial Sequence: Synthetic polynucleotide"
atgaattctattcaaatactgcaggtaccactggcaaaggagaagtccctgatggttatagtgtctccagagcaaacacagatgatttccttggcgtctgctgtaccctctcagacatctgtgtacttctgtgccagcagtgtgaacgtgtcgactatggctacaccttcggttcggggaccaggttaaccgttgtaggtaaggctgggggtctctaggaggggtgcgatggcatgcat

SEQ ID NO: 941 - DNA, 239 bp, Artificial Sequence
  source: /note="Description of Artificial Sequence: Synthetic polynucleotide"
atgaattctactcagttggtgctggtatcactgaccaaggagaagtccccaatggctacaatgtctccagatcaaccacagaggatttccctgctgtcggctgctccctcccagacatctgtgtacttctgtgccagcagttgtcatcggtcgactatggctacaccttcggttcggggaccaggttaaccgttgtaggtaaggctgggggtctctaggaggggtgcgatggcatgcat

SEQ ID NO: 942 - DNA, 239 bp, Artificial Sequence
  source: /note="Description of Artificial Sequence: Synthetic polynucleotide"
atgaattctattcagttggtgctggtatcactgacaaaggagaagtcccgaatggctacaacgtctccagatcaaccacagaggatttccctggagttggctgctccctcccagacatctgtgtacttctgtgccagcagtaggcttgagtcgactatggctacaccttcggttcggggaccaggttaaccgttgtaggtaaggctgggggtctctaggaggggtgcgatggcatgcat

SEQ ID NO: 943 - DNA, 239 bp, Artificial Sequence
  source: /note="Description of Artificial Sequence: Synthetic polynucleotide"
atgaattctactcagttgctgctgctctcactgacaaaggagaagttcccaatggctacaatgtctccagatcaaacacagaggatttccctggagtcagctgctccctctcagacttctgtttacttctgtgccagcagtacacacgtgtcgactatggctacaccttcggttcggggaccaggttaaccgttgtaggtaaggctgggggtctctaggaggggtgcgatggcatgcat

SEQ ID NO: 944 - DNA, 239 bp, Artificial Sequence
  source: /note="Description of Artificial Sequence: Synthetic polynucleotide"
atgaattctactactcagctgctgctggtactactgacaaagaagtccccaatggctacaatgtctctagattaaacacagaggatttccctggtgtcggctgctccctcccagacatctgtgtacttgtgtgccagcagttccacagtgtcgactatggctacaccttcggttcggggaccaggttaaccgttgtaggtaaggctgggggtctctaggaggggtgcgatggcatgcat

SEQ ID NO: 945 - DNA, 239 bp, Artificial Sequence
  source: /note="Description of Artificial Sequence: Synthetic polynucleotide"
atgaattctactcagttgctgctggtatcactgacaaaggagaagtccccgatggctacaatgtatccagatcaaacacagaggatttccctggagtcagctgctccctcccagacatctgtatacttctgtgccagcagtcagtctgtgtcgactatggctacaccttcggttcggggaccaggttaaccgttgtaggtaaggctgggggtctctaggaggggtgcgatggcatgcat

SEQ ID NO: 946 - DNA, 239 bp, Artificial Sequence
  source: /note="Description of Artificial Sequence: Synthetic polynucleotide"
atgaattcttccaaggcaaggatgcagcagacaaatcggggcttccccgtgatcggttctctgcacagaggtctgagggatccatctccattccagcgcacacagcagggggacttggctgtgtatctctgtgccagcagctccatgtggtcgactatggctacaccttcggttcggggaccaggttaaccgttgtaggtaaggctgggggtctctaggaggggtgcgatggcatgcat

SEQ ID NO: 947 - DNA, 239 bp, Artificial Sequence
  source: /note="Description of Artificial Sequence: Synthetic polynucleotide"
atgaattcttccaaggcaacagtgcaccagacaaatcagggctgcccagtgatcgcttctctgcagagaggactgggggatccgtctccaatccagcgcacacagcaggaggactcggccgtgtatctctgtgccagcagctcactgcagtcgactatggctacaccttcggttcggggaccaggttaaccgttgtaggtaaggctgggggtctctaggaggggtgcgatggcatgcat

SEQ ID NO: 948 - DNA, 239 bp, Artificial Sequence
  source: /note="Description of Artificial Sequence: Synthetic polynucleotide"
atgaattcttccaaggcacgggtgcggcagatgactcagggctgcccaacgatcggttctttgcagtcaggcctgagggatccgtctctaatccagcgcacagagcggggggactcagccgtgtatctctgtgccagcagccaagtcacgtcgactatggctacaccttcggttcggggaccaggttaaccgttgtaggtaaggctgggggtctctaggaggggtgcgatggcatgcat

SEQ ID NO: 949 - DNA, 239 bp, Artificial Sequence
  source: /note="Description of Artificial Sequence: Synthetic polynucleotide"
atgaattctcccagagtgatgctcaacgagacaaatcagggcggcccagtggtcggttctctgcagagaggcctgagagatccgtctccaatccagcgcacagagcagggggactcagctgtgtatctctgtgccagcagctagacggagtcgactatggctacaccttcggttcggggaccaggttaaccgttgtaggtaaggctgggggtctctaggaggggtgcgatggcatgcat

SEQ ID NO: 950 - DNA, 239 bp, Artificial Sequence
  source: /note="Description of Artificial Sequence: Synthetic polynucleotide"
atgaattcttcaattatgaagcccaacaagacaaatcagggctgcccaatgatcggttctctgcagagaggcctgagggatccatctccaatccagcgcacagagcagcgggactcggccatgtatcgctgtgccagcagcgagcgatagtcgactatggctacaccttcggttcggggaccaggttaaccgttgtaggtaaggctgggggtctctaggaggggtgcgatggcatgcat

SEQ ID NO: 951 - DNA, 239 bp, Artificial Sequence
  source: /note="Description of Artificial Sequence: Synthetic polynucleotide"
atgaattcttcaattatgaagctcaaccagacaaatcagggctgcccagtgatcggttctctgcagagaggcctgagggatccatctccaattcagcgcacagagcagcgggactcagccatgtatcgctgtgccagcagcctcgagaagtcgactatggctacaccttcggttcggggaccaggttaaccgttgtaggtaaggctgggggtctctaggaggggtgcgatggcatgcat

SEQ ID NO: 952 - DNA, 239 bp, Artificial Sequence
  source: /note="Description of Artificial Sequence: Synthetic polynucleotide"
atgaattcttccagaatgaagctcaactagacaaatcggggctgcccagtgatcgcttctttgcagaaaggcctgagggatccgtctccaatccagcgcacacagcaggaggactccgccgtgtatctctgtgccagcagcatgacaccgtcgactatggctacaccttcggttcggggaccaggttaaccgttgtaggtaaggctgggggtctctaggaggggtgcgatggcatgcat

SEQ ID NO: 953 - DNA, 239 bp, Artificial Sequence
  source: /note="Description of Artificial Sequence: Synthetic polynucleotide"
atgaattcttccagaatgaagctcaactagaaaaatcaaggctgctcagtgatcggttctctgcagagaggcctaagggatctttctccaatccagcgcacagagcagggggactcggccatgtatctctgtgccagcagccttcacgagtcgactatggctacaccttcggttcggggaccaggttaaccgttgtaggtaaggctgggggtctctaggaggggtgcgatggcatgcat

SEQ ID NO: 954 - DNA, 239 bp, Artificial Sequence
  source: /note="Description of Artificial Sequence: Synthetic polynucleotide"
atgaattctcagtattataatggagaagagagagcaaaaggaaacattcttgaacgattctccgcacaacagttccctgacttgcactctcctgagctctctggagctgggggactcagctttgtatttctgtgccagcagcgtagagtgtcgactatggctacaccttcggttcggggaccaggttaaccgttgtaggtaaggctgggggtctctaggaggggtgcgatggcatgcat

SEQ ID NO: 955 - DNA, 239 bp, Artificial Sequence
  source: /note="Description of Artificial Sequence: Synthetic polynucleotide"
atgaattctactcatatggtgttcacgacactaacaaaggagaagtctcagatggctacagtgtctctagatcaaacacagaggacctccctggagtctgctgcctcctcccagacatctgtatatttctgcgccagcagttcgtcgatgtcgactatggctacaccttcggttcggggaccaggttaaccgttgtaggtaaggctgggggtctctaggaggggtgcgatggcatgcat

SEQ ID NO: 956 - DNA, 239 bp, Artificial Sequence
  source: /note="Description of Artificial Sequence: Synthetic polynucleotide"
atgaattctactcagcagctgctgatattacagataaaggagaagtccccgatggctatgttgtctccagatccaagacagagaatttccctggagtcagctacccgctcccagacatctgtgtatttctgcgccagcagtagctagtggtcgactatggctacaccttcggttcggggaccaggttaaccgttgtaggtaaggctgggggtctctaggaggggtgcgatggcatgcat

SEQ ID NO: 957 - DNA, 239 bp, Artificial Sequence
  source: /note="Description of Artificial Sequence: Synthetic polynucleotide"
atgaattctactcatatggtgttaaagatactgacaaaggagaagtctcagatggctatagtgtctctagatcaaagacagaggatttccctggagtccgctaccagctcccagacatctgtgtacttctgtgccatcagttgagacctgtcgactatggctacaccttcggttcggggaccaggttaaccgttgtaggtaaggctgggggtctctaggaggggtgcgatggcatgcat

SEQ ID NO: 958 - DNA, 239 bp, Artificial Sequence
  source: /note="Description of Artificial Sequence: Synthetic polynucleotide"
atgaattctttcaggatgagagtgtagtagatgattcacagttgcctaaggatcgattttctgcagagaggctcaaaggagtagactccaatccagcctgcagagcttggggactcggccatgtatctctgtgccagcagcgatggcttgtcgactatggctacaccttcggttcggggaccaggttaaccgttgtaggtaaggctgggggtctctaggaggggtgcgatggcatgcat

SEQ ID NO: 959 - DNA, 239 bp, Artificial Sequence
  source: /note="Description of Artificial Sequence: Synthetic polynucleotide"
atgaattctttcagaataacggtgtagtggatgattcacagttgcctaaggatcgattttctgcagagaggctcaaaggagtagactccaatccagcctgcaaagcttgaggactcggccgtgtatctctgtgccagcagcgcatctgagtcgactatggctacaccttcggttcggggaccaggttaaccgttgtaggtaaggctgggggtctctaggaggggtgcgatggcatgcat

SEQ ID NO: 960 - DNA, 239 bp, Artificial Sequence
  source: /note="Description of Artificial Sequence: Synthetic polynucleotide"
atgaattctatgagaatgaggaagcagtagacgattcacagttgcctaaggatcgattttctgcagagaggctcaaaggagtagactccaatccagcctgcagagcttggggactcggccgtgtatctctgtgccagcagcgacactctgtcgactatggctacaccttcggttcggggaccaggttaaccgttgtaggtaaggctgggggtctctaggaggggtgcgatggcatgcat

SEQ ID NO: 961 - DNA, 239 bp, Artificial Sequence
  source: /note="Description of Artificial Sequence: Synthetic polynucleotide"
atgaattctttaacaacaacgttccgatagatgattcagggatgcccgaggatcgattctcagctaagatgcctaatgcatcattctccaatccagccctcagaacccagggactcagctgtgtacttctgtgccagcagttgctacacgtcgactatggctacaccttcggttcggggaccaggttaaccgttgtaggtaaggctgggggtctctaggaggggtgcgatggcatgcat

SEQ ID NO: 962 - DNA, 239 bp, Artificial Sequence
  source: /note="Description of Artificial Sequence: Synthetic polynucleotide"
atgaattctttaacaacaacgttccgatagatgattcagggatgcccgaggatcgattctcagctaagatgcctaatgcatcattctccaatccagccctcagaacccagggactcagctgtgtacttctgtgccagcagttcagcttggtcgactatggctacaccttcggttcggggaccaggttaaccgttgtaggtaaggctgggggtctctaggaggggtgcgatggcatgcat

SEQ ID NO: 963 - DNA, 239 bp, Artificial Sequence
  source: /note="Description of Artificial Sequence: Synthetic polynucleotide"
atgaattcttccgcaaccgggctcctctagatgattcggggatgccgaaggatcgattctcagcagagatgcctgatgcaactttagccaatccagccctcagaacccagggactcagctgtgtatttttgtgctagtggtttcggaacgtcgactatggctacaccttcggttcggggaccaggttaaccgttgtaggtaaggctgggggtctctaggaggggtgcgatggcatgcat

SEQ ID NO: 964 - DNA, 239 bp, Artificial Sequence
  source: /note="Description of Artificial Sequence: Synthetic polynucleotide"
atgaattctcgttttatgaaaagatgcagagcgataaaggaagcatccctgatcgattctcagctcaacagttcagtgactatcattctgatgagctccttggagctgggggactcagccctgtacttctgtgccagcagcgcaattcggtcgactatggctacaccttcggttcggggaccaggttaaccgttgtaggtaaggctgggggtctctaggaggggtgcgatggcatgcat

SEQ ID NO: 965 - DNA, 239 bp, Artificial Sequence
  source: /note="Description of Artificial Sequence: Synthetic polynucleotide"
atgaattctttgtgaaagagtctaaacaggatgagtccggtatgcccaacaatcgattcttagctgaaaggactggagggacgtattctagtgcagcctgcagaactggaggattctggagtttatttctgtgccagcagccaagaggtgtcgactatggctacaccttcggttcggggaccaggttaaccgttgtaggtaaggctgggggtctctaggaggggtgcgatggcatgcat

SEQ ID NO: 966 - DNA, 239 bp, Artificial Sequence
  source: /note="Description of Artificial Sequence: Synthetic polynucleotide"
atgaattccactactatgacaaagattttaacaatgaagcagacacccctgataacttccaatccaggaggccgaacacttctttctgctatccgctcaccaggcctgggggacgcagccatgtacctgtgtgccaccagcgaatggacgtcgactatggctacaccttcggttcggggaccaggttaaccgttgtaggtaaggctgggggtctctaggaggggtgcgatggcatgcat

SEQ ID NO: 967 - DNA, 239 bp, Artificial Sequence
  source: /note="Description of Artificial Sequence: Synthetic polynucleotide"
atgaattcttccagaatgaaaatgtctttgatgaaacaggtatgcccaaggaaagattttcagctaagtgcctcccaaattcaccctgtaatccaggctacgaagcttgaggattcagcagtgtatttttgtgccagcagcaactgccagtcgactatggctacaccttcggttcggggaccaggttaaccgttgtaggtaaggctgggggtctctaggaggggtgcgatggcatgcat

SEQ ID NO: 968 - DNA, 239 bp, Artificial Sequence
  source: /note="Description of Artificial Sequence: Synthetic polynucleotide"
atgaattctccttccagtaccaaaacattgcagttgattcagggatgcccaaggaacgattcacagctgaaagacctaacggaacgtcttaagatccatcccgcagagccgagggactcagccgtgtatctctacagtagccctagtaggtcgactatggctacaccttcggttcggggaccaggttaaccgttgtaggtaaggctgggggtctctaggaggggtgcgatggcatgcat

SEQ ID NO: 969 - DNA, 239 bp, Artificial Sequence
  source: /note="Description of Artificial Sequence: Synthetic polynucleotide"
atgaattcctccagaaagaaaatatcatagatgagtcaggaatgccaaaggaacgattttctgctgaatttcccaaagagggccccagcaatccagcaggtagtgcgaggagattcggcagcttatttctgtgccagctcactgacgttgtcgactatggctacaccttcggttcggggaccaggttaaccgttgtaggtaaggctgggggtctctaggaggggtgcgatggcatgcat

SEQ ID NO: 970 - DNA, 239 bp, Artificial Sequence
  source: /note="Description of Artificial Sequence: Synthetic polynucleotide"
atgaattctactcacagatagtaaatgactttcagaaaggagatatagctgaagggtacagcgtctctcgggagaagaaggaatcctttcgtgacatcggcccaaaagaacccgacagctttctatctctgtgccagtagttgcagacagtcgactatggctacaccttcggttcggggaccaggttaaccgttgtaggtaaggctgggggtctctaggaggggtgcgatggcatgcat

SEQ ID NO: 971 - DNA, 239 bp, Artificial Sequence
  source: /note="Description of Artificial Sequence: Synthetic polynucleotide"
atgaattctccaatgagggctccaaggccacatacgagcaaggcgtcgagaaggacaagtttctcatcaaccatgcaagcctgaccttgtacagtgaccagtgcccatcctgaagacagcagcttctacatctgcagtgctagttgaccgtcgactatggctacaccttcggttcggggaccaggttaaccgttgtaggtaaggctgggggtctctaggaggggtgcgatggcatgcat

SEQ ID NO: 972 - DNA, 239 bp, Artificial Sequence
  source: /note="Description of Artificial Sequence: Synthetic polynucleotide"
atgaattcactcctttgatgtcaaagatataaacaaaggagagatctctgatggatacagtgtctctcgacaggcacaggctaaattctctagagtctgccatccccaaccagacagctctttacttctgtgccaccagtggtctcctagtcgactatggctacaccttcggttcggggaccaggttaaccgttgtaggtaaggctgggggtctctaggaggggtgcgatggcatgcat

SEQ ID NO: 973 - DNA, 239 bp, Artificial Sequence
  source: /note="Description of Artificial Sequence: Synthetic polynucleotide"
atgaattctattcctatggagttaattccacagagaagggagatctttcctctgagtcaacagtctccagaataaggacggagcattttcctggagtctgccaggccctcacatacctctcagtacctctgtgccagcagtctgcaatcgtcgactatggctacaccttcggttcggggaccaggttaaccgttgtaggtaaggctgggggtctctaggaggggtgcgatggcatgcat

SEQ ID NO: 974 - DNA, 239 bp, Artificial Sequence
  source: /note="Description of Artificial Sequence: Synthetic polynucleotide"
atgaattctattcaatgaatgttgaggtgactgataagggagatgttcctgaagggtacaaagtctctcgaaaagagaagaggaatttccctggagtcgcccagccccaaccagacctctctgtacttctgtgccagcagttgagcgaagtcgactatggctacaccttcggttcggggaccaggttaaccgttgtaggtaaggctgggggtctctaggaggggtgcgatggcatgcat

SEQ ID NO: 975 - DNA, 239 bp, Artificial Sequence
  source: /note="Description of Artificial Sequence: Synthetic polynucleotide"
atgaattcttctcatatgatgttaaaatgaaagaaaaaggagatattcctgaggggtacagtgtctctagagagaagaaggagcgcttctctggagtccgccagcaccaaccagacatctatgtacctctgtgccagcagtttggactggtcgactatggctacaccttcggttcggggaccaggttaaccgttgtaggtaaggctgggggtctctaggaggggtgcgatggcatgcat

SEQ ID NO: 976 - DNA, 239 bp, Artificial Sequence
  source: /note="Description of Artificial Sequence: Synthetic polynucleotide"
atgaattcgcaaatcagggctctgaggccacatatgagagtggatttgtcattgacaagtttcccatcagccgcccaaacctaacattctactgtgagcaacatgagccctgaagacagcagcatatatctctgcagcgttagcaatccgtcgactatggctacaccttcggttcggggaccaggttaaccgttgtaggtaaggctgggggtctctaggaggggtgcgatggcatgcat

SEQ ID NO: 977 - DNA, 239 bp, Artificial Sequence
  source: /note="Description of Artificial Sequence: Synthetic polynucleotide"
atgaattcctcttctactccgttggtattggccagatcagctctgaggtgccccagaatctctcagcctccagaccccaggaccggcagtagttctaagaagctccttctcagtgactctggcttctatctctgtgcctggcgaactacgtcgactatggctacaccttcggttcggggaccaggttaaccgttgtaggtaaggctgggggtctctaggaggggtgcgatggcatgcat

SEQ ID NO: 978 - DNA, 239 bp, Artificial Sequence
  source: /note="Description of Artificial Sequence: Synthetic polynucleotide"
atgaattcttttataataatgaaatctcagagaagtctgaaatattcgatgatcaattctcagttgaaaggcctgatggatcaaatttcaatccggtccacaaagctggaggactcagccatgtacttctgtgccagcagtcaaggtcagtcgacgaaacaccatatattttggagagggaagttggctcactgttgtaggtgagtaagtcaaggctggacagctgggaacgcatgcat

SEQ ID NO: 979 - DNA, 239 bp, Artificial Sequence
  source: /note="Description of Artificial Sequence: Synthetic polynucleotide"
atgaattcagctacaataataaggagctcattataaatgaaacagttccaaatcgcttctcacctaaatctccagacaaagctcacttaaatcaattccctggagcttggtgactctgctgtgtatttctgtgccagcagctacgtacggtcgacgaaacaccatatattttggagagggaagttggctcactgttgtaggtgagtaagtcaaggctggacagctgggaacgcatgcat

SEQ ID NO: 980 - DNA, 239 bp, Artificial Sequence
  source: /note="Description of Artificial Sequence: Synthetic polynucleotide"
atgaattcgtctacagctatgagaaactctctataaatgaaagtgtgccaagtcgcttctcacctgaatgccccaacagctctctcttaactacacgccctgcagccagaagactcagccctgtatctctgcgccagcagctacgcgttgtcgacgaaacaccatatattttggagagggaagttggctcactgttgtaggtgagtaagtcaaggctggacagctgggaacgcatgcat

SEQ ID NO: 981 - DNA, 239 bp, Artificial Sequence
  source: /note="Description of Artificial Sequence: Synthetic polynucleotide"
atgaattcgtctacaactttaaagaacagactgaaaacaacagtgtgccaagtcgcttctcacctgaatgccccaacagctctcacttatctacacaccctgcagccagaagactcggccctgtatctctgcgccagcagcctcagtgagtcgacgaaacaccatatattttggagagggaagttggctcactgttgtaggtgagtaagtcaaggctggacagctgggaacgcatgcat

SEQ ID NO: 982 - DNA, 239 bp, Artificial Sequence
  source: /note="Description of Artificial Sequence: Synthetic polynucleotide"
atgaattcgtctacagtcttgaagaacgggttgaaaacaacagtgtgccaagtcgcttctcacctgaatgccccaacagctctcacttatctacacaccctgcagccagaagactcggccctgtatctctgcgccagcagcgtgtctacgtcgacgaaacaccatatattttggagagggaagttggctcactgttgtaggtgagtaagtcaaggctggacagctgggaacgcatgcat

SEQ ID NO: 983 - DNA, 239 bp, Artificial Sequence
  source: /note="Description of Artificial Sequence: Synthetic polynucleotide"
atgaattctgaatacttcagtgagacacagagaaacaaaggaaacttccctggtcgattctcagggcgccagttctctaactctcgctcttgtgagcaccttggagctgggggactcggccctttatctttgcgccagcagagtaccgagtcgacgaaacaccatatattttggagagggaagttggctcactgttgtaggtgagtaagtcaaggctggacagctgggaacgcatgcat

SEQ ID NO: 984 - DNA, 239 bp, Artificial Sequence
  source: /note="Description of Artificial Sequence: Synthetic polynucleotide"
atgaattctgaatatgctaatgagttaaggagatcagaaggaaacttccctaatcgattctcagggcgccagttccatgactgttgctcttgtgagtgccttggagctgggggactcggccctgtatctctgtgccagaagttgcctcagtcgacgaaacaccatatattttggagagggaagttggctcactgttgtaggtgagtaagtcaaggctggacagctgggaacgcatgcat

SEQ ID NO: 985 - DNA, 239 bp, Artificial Sequence
  source: /note="Description of Artificial Sequence: Synthetic polynucleotide"
atgaattctcagtattatagggaggaagagaatggcagaggaaacttccctcctagattctcaggtctccagttccctaattatagctcttgtgaacgccttggagctggacgactcggccctgtatctctgtgccagcagtcgttagcgtcgacgaaacaccatatattttggagagggaagttggctcactgttgtaggtgagtaagtcaaggctggacagctgggaacgcatgcat

SEQ ID NO: 986 - DNA, 239 bp, Artificial Sequence
  source: /note="Description of Artificial Sequence: Synthetic polynucleotide"
atgaattctcagtattatgagaaagaagagagaggaagaggaaacttccctgatcgattctcagctcgccagttccctaactatagctcttgtgaacgccttgttgctgggggactcggccctgtatctctgtgccagcagtggacatggtcgacgaaacaccatatattttggagagggaagttggctcactgttgtaggtgagtaagtcaaggctggacagctgggaacgcatgcat

SEQ ID NO: 987 - DNA, 239 bp, Artificial Sequence
  source: /note="Description of Artificial Sequence: Synthetic polynucleotide"
atgaattctcagtattatgaggaggaagagagacagagaggcaacttccctgatcgattctcaggtcaccagttccctaactatagctcttgtgaacgccttgttgctgggggactcggccctctatctctgtgccagcagaggttgctgtcgacgaaacaccatatattttggagagggaagttggctcactgttgtaggtgagtaagtcaaggctggacagctgggaacgcatgcat

SEQ ID NO: 988 - DNA, 239 bp, Artificial Sequence
  source: /note="Description of Artificial Sequence: Synthetic polynucleotide"
atgaattctcagtattatgagaaagaagagagaggaagaggaaacttccctgatcaattctcaggtcaccagttccctaactatagctcttgtgaacgccttgttgctaggggactcggccctctatctctgtgccagcaggtacagtggtcgacgaaacaccatatattttggagagggaagttggctcactgttgtaggtgagtaagtcaaggctggacagctgggaacgcatgcat

SEQ ID NO: 989 - DNA, 239 bp, Artificial Sequence
  source: /note="Description of Artificial Sequence: Synthetic polynucleotide"
atgaattcttggtatgacgagggtgaagagagaaacagaggaaacttccctcctagattttcaggtcgccagttccctaattatagctcttgtgaacgccttggagctggaggactcggccctgtatctctgtgccagcagatccatgggtcgacgaaacaccatatattttggagagggaagttggctcactgttgtaggtgagtaagtcaaggctggacagctgggaacgcatgcat

SEQ ID NO: 990 - DNA, 239 bp, Artificial Sequence
  source: /note="Description of Artificial Sequence: Synthetic polynucleotide"
atgaattctactcagcttctgagggtaccactgacaaaggagaagtccccaatggctacaatgtctccagattaaacaaacgggagttctctggagtcggctgctccctcccagacatctgtgtacttctgtgccagcagttgatgcgagtcgacgaaacaccatatattttggagagggaagttggctcactgttgtaggtgagtaagtcaaggctggacagctgggaacgcatgcat

SEQ ID NO: 991 - DNA, 239 bp, Artificial Sequence
  source: /note="Description of Artificial Sequence: Synthetic polynucleotide"
atgaattctactcagttggtgagggtacaactgccaaaggagaggtccctgatggctacaatgtctccagattaaaaaaacagaatttccttggagtcggctgctccctcccaaacatctgtgtacttctgtgccagcagtgtagcagtgtcgacgaaacaccatatattttggagagggaagttggctcactgttgtaggtgagtaagtcaaggctggacagctgggaacgcatgcat

SEQ ID NO: 992 - DNA, 239 bp, Artificial Sequence
  source: /note="Description of Artificial Sequence: Synthetic polynucleotide"
atgaattctactcagttggtgagggtacaactgccaaaggagaggtccctgatggctacaatgtctccagattaaaaaaacagaatttccttggagtcggctgctccctcccaaacatctgtgtacttctgtgccagcagtggatcatcgtcgacgaaacaccatatattttggagagggaagttggctcactgttgtaggtgagtaagtcaaggctggacagctgggaacgcatgcat

SEQ ID NO: 993 - DNA, 239 bp, Artificial Sequence
  source: /note="Description of Artificial Sequence: Synthetic polynucleotide"
atgaattctattcaaatactgcaggtaccactggcaaaggagaagtccctgatggttatagtgtctccagagcaaacacagatgatttccttggcgtctgctgtaccctctcagacatctgtgtacttctgtgccagcagtgtgaacgtgtcgacgaaacaccatatattttggagagggaagttggctcactgttgtaggtgagtaagtcaaggctggacagctgggaacgcatgcat

SEQ ID NO: 994 - DNA, 239 bp, Artificial Sequence
  source: /note="Description of Artificial Sequence: Synthetic polynucleotide"
atgaattctactcagttggtgctggtatcactgaccaaggagaagtccccaatggctacaatgtctccagatcaaccacagaggatttccctgctgtcggctgctccctcccagacatctgtgtacttctgtgccagcagttgtcatcggtcgacgaaacaccatatattttggagagggaagttggctcactgttgtaggtgagtaagtcaaggctggacagctgggaacgcatgcat

SEQ ID NO: 995 - DNA, 239 bp, Artificial Sequence
  source: /note="Description of Artificial Sequence: Synthetic polynucleotide"
atgaattctattcagttggtgctggtatcactgacaaaggagaagtcccgaatggctacaacgtctccagatcaaccacagaggatttccctggagttggctgctccctcccagacatctgtgtacttctgtgccagcagtaggcttgagtcgacgaaacaccatatattttggagagggaagttggctcactgttgtaggtgagtaagtcaaggctggacagctgggaacgcatgcat

SEQ ID NO: 996 - DNA, 239 bp, Artificial Sequence
  source: /note="Description of Artificial Sequence: Synthetic polynucleotide"
atgaattctactcagttgctgctgctctcactgacaaaggagaagttcccaatggctacaatgtctccagatcaaacacagaggatttccctggagtcagctgctccctctcagacttctgtttacttctgtgccagcagtacacacgtgtcgacgaaacaccatatattttggagagggaagttggctcactgttgtaggtgagtaagtcaaggctggacagctgggaacgcatgcat

SEQ ID NO: 997 - DNA, 239 bp, Artificial Sequence
  source: /note="Description of Artificial Sequence: Synthetic polynucleotide"
atgaattctactactcagctgctgctggtactactgacaaagaagtccccaatggctacaatgtctctagattaaacacagaggatttccctggtgtcggctgctccctcccagacatctgtgtacttgtgtgccagcagttccacagtgtcgacgaaacaccatatattttggagagggaagttggctcactgttgtaggtgagtaagtcaaggctggacagctgggaacgcatgcat

SEQ ID NO: 998 - DNA, 239 bp, Artificial Sequence
  source: /note="Description of Artificial Sequence: Synthetic polynucleotide"
atgaattctactcagttgctgctggtatcactgacaaaggagaagtccccgatggctacaatgtatccagatcaaacacagaggatttccctggagtcagctgctccctcccagacatctgtatacttctgtgccagcagtcagtctgtgtcgacgaaacaccatatattttggagagggaagttggctcactgttgtaggtgagtaagtcaaggctggacagctgggaacgcatgcat

SEQ ID NO: 999 - DNA, 239 bp, Artificial Sequence
  source: /note="Description of Artificial Sequence: Synthetic polynucleotide"
atgaattcttccaaggcaaggatgcagcagacaaatcggggcttccccgtgatcggttctctgcacagaggtctgagggatccatctccattccagcgcacacagcagggggacttggctgtgtatctctgtgccagcagctccatgtggtcgacgaaacaccatatattttggagagggaagttggctcactgttgtaggtgagtaagtcaaggctggacagctgggaacgcatgcat

SEQ ID NO: 1000 - DNA, 239 bp, Artificial Sequence
  source: /note="Description of Artificial Sequence: Synthetic polynucleotide"
atgaattcttccaaggcaacagtgcaccagacaaatcagggctgcccagtgatcgcttctctgcagagaggactgggggatccgtctccaatccagcgcacacagcaggaggactcggccgtgtatctctgtgccagcagctcactgcagtcgacgaaacaccatatattttggagagggaagttggctcactgttgtaggtgagtaagtcaaggctggacagctgggaacgcatgcat

SEQ ID NO: 1001 - DNA, 239 bp, Artificial Sequence
  source: /note="Description of Artificial Sequence: Synthetic polynucleotide"
atgaattcttccaaggcacgggtgcggcagatgactcagggctgcccaacgatcggttctttgcagtcaggcctgagggatccgtctctaatccagcgcacagagcggggggactcagccgtgtatctctgtgccagcagccaagtcacgtcgacgaaacaccatatattttggagagggaagttggctcactgttgtaggtgagtaagtcaaggctggacagctgggaacgcatgcat

SEQ ID NO: 1002 - DNA, 239 bp, Artificial Sequence
  source: /note="Description of Artificial Sequence: Synthetic polynucleotide"
atgaattctcccagagtgatgctcaacgagacaaatcagggcggcccagtggtcggttctctgcagagaggcctgagagatccgtctccaatccagcgcacagagcagggggactcagctgtgtatctctgtgccagcagctagacggagtcgacgaaacaccatatattttggagagggaagttggctcactgttgtaggtgagtaagtcaaggctggacagctgggaacgcatgcat

SEQ ID NO: 1003 - DNA, 239 bp, Artificial Sequence
  source: /note="Description of Artificial Sequence: Synthetic polynucleotide"
atgaattcttcaattatgaagcccaacaagacaaatcagggctgcccaatgatcggttctctgcagagaggcctgagggatccatctccaatccagcgcacagagcagcgggactcggccatgtatcgctgtgccagcagcgagcgatagtcgacgaaacaccatatattttggagagggaagttggctcactgttgtaggtgagtaagtcaaggctggacagctgggaacgcatgcat

SEQ ID NO: 1004 - DNA, 239 bp, Artificial Sequence
  source: /note="Description of Artificial Sequence: Synthetic polynucleotide"
atgaattcttcaattatgaagctcaaccagacaaatcagggctgcccagtgatcggttctctgcagagaggcctgagggatccatctccaattcagcgcacagagcagcgggactcagccatgtatcgctgtgccagcagcctcgagaagtcgacgaaacaccatatattttggagagggaagttggctcactgttgtaggtgagtaagtcaaggctggacagctgggaacgcatgcat

SEQ ID NO: 1005 - DNA, 239 bp, Artificial Sequence
  source: /note="Description of Artificial Sequence: Synthetic polynucleotide"
atgaattcttccagaatgaagctcaactagacaaatcggggctgcccagtgatcgcttctttgcagaaaggcctgagggatccgtctccaatccagcgcacacagcaggaggactccgccgtgtatctctgtgccagcagcatgacaccgtcgacgaaacaccatatattttggagagggaagttggctcactgttgtaggtgagtaagtcaaggctggacagctgggaacgcatgcat

SEQ ID NO: 1006 - DNA, 239 bp, Artificial Sequence
  source: /note="Description of Artificial Sequence: Synthetic polynucleotide"
atgaattcttccagaatgaagctcaactagaaaaatcaaggctgctcagtgatcggttctctgcagagaggcctaagggatctttctccaatccagcgcacagagcagggggactcggccatgtatctctgtgccagcagccttcacgagtcgacgaaacaccatatattttggagagggaagttggctcactgttgtaggtgagtaagtcaaggctggacagctgggaacgcatgcat

SEQ ID NO: 1007 - DNA, 239 bp, Artificial Sequence
  source: /note="Description of Artificial Sequence: Synthetic polynucleotide"
atgaattctcagtattataatggagaagagagagcaaaaggaaacattcttgaacgattctccgcacaacagttccctgacttgcactctcctgagctctctggagctgggggactcagctttgtatttctgtgccagcagcgtagagtgtcgacgaaacaccatatattttggagagggaagttggctcactgttgtaggtgagtaagtcaaggctggacagctgggaacgcatgcat

SEQ ID NO: 1008 - DNA, 239 bp, Artificial Sequence
  source: /note="Description of Artificial Sequence: Synthetic polynucleotide"
atgaattctactcatatggtgttcacgacactaacaaaggagaagtctcagatggctacagtgtctctagatcaaacacagaggacctccctggagtctgctgcctcctcccagacatctgtatatttctgcgccagcagttcgtcgatgtcgacgaaacaccatatattttggagagggaagttggctcactgttgtaggtgagtaagtcaaggctggacagctgggaacgcatgcat

SEQ ID NO: 1009 - DNA, 239 bp, Artificial Sequence
  source: /note="Description of Artificial Sequence: Synthetic polynucleotide"
atgaattctactcagcagctgctgatattacagataaaggagaagtccccgatggctatgttgtctccagatccaagacagagaatttccctggagtcagctacccgctcccagacatctgtgtatttctgcgccagcagtagctagtggtcgacgaaacaccatatattttggagagggaagttggctcactgttgtaggtgagtaagtcaaggctggacagctgggaacgcatgcat

SEQ ID NO: 1010 - DNA, 239 bp, Artificial Sequence
  source: /note="Description of Artificial Sequence: Synthetic polynucleotide"
atgaattctactcatatggtgttaaagatactgacaaaggagaagtctcagatggctatagtgtctctagatcaaagacagaggatttccctggagtccgctaccagctcccagacatctgtgtacttctgtgccatcagttgagacctgtcgacgaaacaccatatattttggagagggaagttggctcactgttgtaggtgagtaagtcaaggctggacagctgggaacgcatgcat

SEQ ID NO: 1011 - DNA, 239 bp, Artificial Sequence
  source: /note="Description of Artificial Sequence: Synthetic polynucleotide"
atgaattctttcaggatgagagtgtagtagatgattcacagttgcctaaggatcgattttctgcagagaggctcaaaggagtagactccaatccagcctgcagagcttggggactcggccatgtatctctgtgccagcagcgatggcttgtcgacgaaacaccatatattttggagagggaagttggctcactgttgtaggtgagtaagtcaaggctggacagctgggaacgcatgcat

SEQ ID NO: 1012 - DNA, 239 bp, Artificial Sequence
  source: /note="Description of Artificial Sequence: Synthetic polynucleotide"
atgaattctttcagaataacggtgtagtggatgattcacagttgcctaaggatcgattttctgcagagaggctcaaaggagtagactccaatccagcctgcaaagcttgaggactcggccgtgtatctctgtgccagcagcgcatctgagtcgacgaaacaccatatattttggagagggaagttggctcactgttgtaggtgagtaagtcaaggctggacagctgggaacgcatgcat

SEQ ID NO: 1013 - DNA, 239 bp, Artificial Sequence
  source: /note="Description of Artificial Sequence: Synthetic polynucleotide"
atgaattctatgagaatgaggaagcagtagacgattcacagttgcctaaggatcgattttctgcagagaggctcaaaggagtagactccaatccagcctgcagagcttggggactcggccgtgtatctctgtgccagcagcgacactctgtcgacgaaacaccatatattttggagagggaagttggctcactgttgtaggtgagtaagtcaaggctggacagctgggaacgcatgcat

SEQ ID NO: 1014 - DNA, 239 bp, Artificial Sequence
  source: /note="Description of Artificial Sequence: Synthetic polynucleotide"
atgaattctttaacaacaacgttccgatagatgattcagggatgcccgaggatcgattctcagctaagatgcctaatgcatcattctccaatccagccctcagaacccagggactcagctgtgtacttctgtgccagcagttgctacacgtcgacgaaacaccatatattttggagagggaagttggctcactgttgtaggtgagtaagtcaaggctggacagctgggaacgcatgcat

SEQ ID NO: 1015 - DNA, 239 bp, Artificial Sequence
  source: /note="Description of Artificial Sequence: Synthetic polynucleotide"
atgaattctttaacaacaacgttccgatagatgattcagggatgcccgaggatcgattctcagctaagatgcctaatgcatcattctccaatccagccctcagaacccagggactcagctgtgtacttctgtgccagcagttcagcttggtcgacgaaacaccatatattttggagagggaagttggctcactgttgtaggtgagtaagtcaaggctggacagctgggaacgcatgcat

SEQ ID NO: 1016 - DNA, 239 bp, Artificial Sequence
  source: /note="Description of Artificial Sequence: Synthetic polynucleotide"
atgaattcttccgcaaccgggctcctctagatgattcggggatgccgaaggatcgattctcagcagagatgcctgatgcaactttagccaatccagccctcagaacccagggactcagctgtgtatttttgtgctagtggtttcggaacgtcgacgaaacaccatatattttggagagggaagttggctcactgttgtaggtgagtaagtcaaggctggacagctgggaacgcatgcat

SEQ ID NO: 1017 - DNA, 239 bp, Artificial Sequence
  source: /note="Description of Artificial Sequence: Synthetic polynucleotide"
atgaattctcgttttatgaaaagatgcagagcgataaaggaagcatccctgatcgattctcagctcaacagttcagtgactatcattctgatgagctccttggagctgggggactcagccctgtacttctgtgccagcagcgcaattcggtcgacgaaacaccatatattttggagagggaagttggctcactgttgtaggtgagtaagtcaaggctggacagctgggaacgcatgcat

SEQ ID NO: 1018 - DNA, 239 bp, Artificial Sequence
  source: /note="Description of Artificial Sequence: Synthetic polynucleotide"
atgaattctttgtgaaagagtctaaacaggatgagtccggtatgcccaacaatcgattcttagctgaaaggactggagggacgtattctagtgcagcctgcagaactggaggattctggagtttatttctgtgccagcagccaagaggtgtcgacgaaacaccatatattttggagagggaagttggctcactgttgtaggtgagtaagtcaaggctggacagctgggaacgcatgcat

SEQ ID NO: 1019 - DNA, 239 bp, Artificial Sequence
  source: /note="Description of Artificial Sequence: Synthetic polynucleotide"
atgaattccactactatgacaaagattttaacaatgaagcagacacccctgataacttccaatccaggaggccgaacacttctttctgctatccgctcaccaggcctgggggacgcagccatgtacctgtgtgccaccagcgaatggacgtcgacgaaacaccatatattttggagagggaagttggctcactgttgtaggtgagtaagtcaaggctggacagctgggaacgcatgcat

SEQ ID NO: 1020 - DNA, 239 bp, Artificial Sequence
  source: /note="Description of Artificial Sequence: Synthetic polynucleotide"
atgaattcttccagaatgaaaatgtctttgatgaaacaggtatgcccaaggaaagattttcagctaagtgcctcccaaattcaccctgtaatccaggctacgaagcttgaggattcagcagtgtatttttgtgccagcagcaactgccagtcgacgaaacaccatatattttggagagggaagttggctcactgttgtaggtgagtaagtcaaggctggacagctgggaacgcatgcat

SEQ ID NO: 1021 - DNA, 239 bp, Artificial Sequence
  source: /note="Description of Artificial Sequence: Synthetic polynucleotide"
atgaattctccttccagtaccaaaacattgcagttgattcagggatgcccaaggaacgattcacagctgaaagacctaacggaacgtcttaagatccatcccgcagagccgagggactcagccgtgtatctctacagtagccctagtaggtcgacgaaacaccatatattttggagagggaagttggctcactgttgtaggtgagtaagtcaaggctggacagctgggaacgcatgcat

SEQ ID NO: 1022 - DNA, 239 bp, Artificial Sequence
  source: /note="Description of Artificial Sequence: Synthetic polynucleotide"
atgaattcctccagaaagaaaatatcatagatgagtcaggaatgccaaaggaacgattttctgctgaatttcccaaagagggccccagcaatccagcaggtagtgcgaggagattcggcagcttatttctgtgccagctcactgacgttgtcgacgaaacaccatatattttggagagggaagttggctcactgttgtaggtgagtaagtcaaggctggacagctgggaacgcatgcat

SEQ ID NO: 1023 - DNA, 239 bp, Artificial Sequence
  source: /note="Description of Artificial Sequence: Synthetic polynucleotide"
atgaattctactcacagatagtaaatgactttcagaaaggagatatagctgaagggtacagcgtctctcgggagaagaaggaatcctttcgtgacatcggcccaaaagaacccgacagctttctatctctgtgccagtagttgcagacagtcgacgaaacaccatatattttggagagggaagttggctcactgttgtaggtgagtaagtcaaggctggacagctgggaacgcatgcat

SEQ ID NO: 1024 - DNA, 239 bp, Artificial Sequence
  source: /note="Description of Artificial Sequence: Synthetic polynucleotide"
atgaattctccaatgagggctccaaggccacatacgagcaaggcgtcgagaaggacaagtttctcatcaaccatgcaagcctgaccttgtacagtgaccagtgcccatcctgaagacagcagcttctacatctgcagtgctagttgaccgtcgacgaaacaccatatattttggagagggaagttggctcactgttgtaggtgagtaagtcaaggctggacagctgggaacgcatgcat

SEQ ID NO: 1025 - DNA, 239 bp, Artificial Sequence
  source: /note="Description of Artificial Sequence: Synthetic polynucleotide"
atgaattcactcctttgatgtcaaagatataaacaaaggagagatctctgatggatacagtgtctctcgacaggcacaggctaaattctctagagtctgccatccccaaccagacagctctttacttctgtgccaccagtggtctcctagtcgacgaaacaccatatattttggagagggaagttggctcactgttgtaggtgagtaagtcaaggctggacagctgggaacgcatgcat

SEQ ID NO: 1026 - DNA, 239 bp, Artificial Sequence
  source: /note="Description of Artificial Sequence: Synthetic polynucleotide"
atgaattctattcctatggagttaattccacagagaagggagatctttcctctgagtcaacagtctccagaataaggacggagcattttcctggagtctgccaggccctcacatacctctcagtacctctgtgccagcagtctgcaatcgtcgacgaaacaccatatattttggagagggaagttggctcactgttgtaggtgagtaagtcaaggctggacagctgggaacgcatgcat

SEQ ID NO: 1027 - DNA, 239 bp, Artificial Sequence
  source: /note="Description of Artificial Sequence: Synthetic polynucleotide"
atgaattctattcaatgaatgttgaggtgactgataagggagatgttcctgaagggtacaaagtctctcgaaaagagaagaggaatttccctggagtcgcccagccccaaccagacctctctgtacttctgtgccagcagttgagcgaagtcgacgaaacaccatatattttggagagggaagttggctcactgttgtaggtgagtaagtcaaggctggacagctgggaacgcatgcat

SEQ ID NO: 1028 - DNA, 239 bp, Artificial Sequence
  source: /note="Description of Artificial Sequence: Synthetic polynucleotide"
atgaattcttctcatatgatgttaaaatgaaagaaaaaggagatattcctgaggggtacagtgtctctagagagaagaaggagcgcttctctggagtccgccagcaccaaccagacatctatgtacctctgtgccagcagtttggactggtcgacgaaacaccatatattttggagagggaagttggctcactgttgtaggtgagtaagtcaaggctggacagctgggaacgcatgcat

SEQ ID NO: 1029 - DNA, 239 bp, Artificial Sequence
  source: /note="Description of Artificial Sequence: Synthetic polynucleotide"
atgaattcgcaaatcagggctctgaggccacatatgagagtggatttgtcattgacaagtttcccatcagccgcccaaacctaacattctactgtgagcaacatgagccctgaagacagcagcatatatctctgcagcgttagcaatccgtcgacgaaacaccatatattttggagagggaagttggctcactgttgtaggtgagtaagtcaaggctggacagctgggaacgcatgcat

SEQ ID NO: 1030 - DNA, 239 bp, Artificial Sequence
  source: /note="Description of Artificial Sequence: Synthetic polynucleotide"
atgaattcctcttctactccgttggtattggccagatcagctctgaggtgccccagaatctctcagcctccagaccccaggaccggcagtagttctaagaagctccttctcagtgactctggcttctatctctgtgcctggcgaactacgtcgacgaaacaccatatattttggagagggaagttggctcactgttgtaggtgagtaagtcaaggctggacagctgggaacgcatgcat

SEQ ID NO: 1031 - DNA, 239 bp, Artificial Sequence
  source: /note="Description of Artificial Sequence: Synthetic polynucleotide"
atgaattcttttataataatgaaatctcagagaagtctgaaatattcgatgatcaattctcagttgaaaggcctgatggatcaaatttcaatccggtccacaaagctggaggactcagccatgtacttctgtgccagcagtcaaggtcagtcgacaatgaaaaactgttttttggcagtggaacccagctctctgtcttgggtatgtaaaagacttctttcgggatagtgtgcatgcat

SEQ ID NO: 1032 - DNA, 239 bp, Artificial Sequence
  source: /note="Description of Artificial Sequence: Synthetic polynucleotide"
atgaattcagctacaataataaggagctcattataaatgaaacagttccaaatcgcttctcacctaaatctccagacaaagctcacttaaatcaattccctggagcttggtgactctgctgtgtatttctgtgccagcagctacgtacggtcgacaatgaaaaactgttttttggcagtggaacccagctctctgtcttgggtatgtaaaagacttctttcgggatagtgtgcatgcat

SEQ ID NO: 1033 - DNA, 239 bp, Artificial Sequence
  source: /note="Description of Artificial Sequence: Synthetic polynucleotide"
atgaattcgtctacagctatgagaaactctctataaatgaaagtgtgccaagtcgcttctcacctgaatgccccaacagctctctcttaactacacgccctgcagccagaagactcagccctgtatctctgcgccagcagctacgcgttgtcgacaatgaaaaactgttttttggcagtggaacccagctctctgtcttgggtatgtaaaagacttctttcgggatagtgtgcatgcat

SEQ ID NO: 1034 - DNA, 239 bp, Artificial Sequence
  source: /note="Description of Artificial Sequence: Synthetic polynucleotide"
atgaattcgtctacaactttaaagaacagactgaaaacaacagtgtgccaagtcgcttctcacctgaatgccccaacagctctcacttatctacacaccctgcagccagaagactcggccctgtatctctgcgccagcagcctcagtgagtcgacaatgaaaaactgttttttggcagtggaacccagctctctgtcttgggtatgtaaaagacttctttcgggatagtgtgcatgcat

SEQ ID NO: 1035 - DNA, 239 bp, Artificial Sequence
  source: /note="Description of Artificial Sequence: Synthetic polynucleotide"
atgaattcgtctacagtcttgaagaacgggttgaaaacaacagtgtgccaagtcgcttctcacctgaatgccccaacagctctcacttatctacacaccctgcagccagaagactcggccctgtatctctgcgccagcagcgtgtctacgtcgacaatgaaaaactgttttttggcagtggaacccagctctctgtcttgggtatgtaaaagacttctttcgggatagtgtgcatgcat

SEQ ID NO: 1036 - DNA, 239 bp, Artificial Sequence
  source: /note="Description of Artificial Sequence: Synthetic polynucleotide"
atgaattctgaatacttcagtgagacacagagaaacaaaggaaacttccctggtcgattctcagggcgccagttctctaactctcgctcttgtgagcaccttggagctgggggactcggccctttatctttgcgccagcagagtaccgagtcgacaatgaaaaactgttttttggcagtggaacccagctctctgtcttgggtatgtaaaagacttctttcgggatagtgtgcatgcat

SEQ ID NO: 1037 - DNA, 239 bp, Artificial Sequence
  source: /note="Description of Artificial Sequence: Synthetic polynucleotide"
atgaattctgaatatgctaatgagttaaggagatcagaaggaaacttccctaatcgattctcagggcgccagttccatgactgttgctcttgtgagtgccttggagctgggggactcggccctgtatctctgtgccagaagttgcctcagtcgacaatgaaaaactgttttttggcagtggaacccagctctctgtcttgggtatgtaaaagacttctttcgggatagtgtgcatgcat

SEQ ID NO: 1038 - DNA, 239 bp, Artificial Sequence
  source: /note="Description of Artificial Sequence: Synthetic polynucleotide"
atgaattctcagtattatagggaggaagagaatggcagaggaaacttccctcctagattctcaggtctccagttccctaattatagctcttgtgaacgccttggagctggacgactcggccctgtatctctgtgccagcagtcgttagcgtcgacaatgaaaaactgttttttggcagtggaacccagctctctgtcttgggtatgtaaaagacttctttcgggatagtgtgcatgcat

SEQ ID NO: 1039 - DNA, 239 bp, Artificial Sequence
  source: /note="Description of Artificial Sequence: Synthetic polynucleotide"
atgaattctcagtattatgagaaagaagagagaggaagaggaaacttccctgatcgattctcagctcgccagttccctaactatagctcttgtgaacgccttgttgctgggggactcggccctgtatctctgtgccagcagtggacatggtcgacaatgaaaaactgttttttggcagtggaacccagctctctgtcttgggtatgtaaaagacttctttcgggatagtgtgcatgcat

SEQ ID NO: 1040 - DNA, 239 bp, Artificial Sequence
  source: /note="Description of Artificial Sequence: Synthetic polynucleotide"
atgaattctcagtattatgaggaggaagagagacagagaggcaacttccctgatcgattctcaggtcaccagttccctaactatagctcttgtgaacgccttgttgctgggggactcggccctctatctctgtgccagcagaggttgctgtcgacaatgaaaaactgttttttggcagtggaacccagctctctgtcttgggtatgtaaaagacttctttcgggatagtgtgcatgcat

SEQ ID NO: 1041 - DNA, 239 bp, Artificial Sequence
  source: /note="Description of Artificial Sequence: Synthetic polynucleotide"
atgaattctcagtattatgagaaagaagagagaggaagaggaaacttccctgatcaattctcaggtcaccagttccctaactatagctcttgtgaacgccttgttgctaggggactcggccctctatctctgtgccagcaggtacagtggtcgacaatgaaaaactgttttttggcagtggaacccagctctctgtcttgggtatgtaaaagacttctttcgggatagtgtgcatgcat

SEQ ID NO: 1042 - DNA, 239 bp, Artificial Sequence
  source: /note="Description of Artificial Sequence: Synthetic polynucleotide"
atgaattcttggtatgacgagggtgaagagagaaacagaggaaacttccctcctagattttcaggtcgccagttccctaattatagctcttgtgaacgccttggagctggaggactcggccctgtatctctgtgccagcagatccatgggtcgacaatgaaaaactgttttttggcagtggaacccagctctctgtcttgggtatgtaaaagacttctttcgggatagtgtgcatgcat

SEQ ID NO: 1043 - DNA, 239 bp, Artificial Sequence
  source: /note="Description of Artificial Sequence: Synthetic polynucleotide"
atgaattctactcagcttctgagggtaccactgacaaaggagaagtccccaatggctacaatgtctccagattaaacaaacgggagttctctggagtcggctgctccctcccagacatctgtgtacttctgtgccagcagttgatgcgagtcgacaatgaaaaactgttttttggcagtggaacccagctctctgtcttgggtatgtaaaagacttctttcgggatagtgtgcatgcat

SEQ ID NO: 1044 - DNA, 239 bp, Artificial Sequence
  source: /note="Description of Artificial Sequence: Synthetic polynucleotide"
atgaattctactcagttggtgagggtacaactgccaaaggagaggtccctgatggctacaatgtctccagattaaaaaaacagaatttccttggagtcggctgctccctcccaaacatctgtgtacttctgtgccagcagtgtagcagtgtcgacaatgaaaaactgttttttggcagtggaacccagctctctgtcttgggtatgtaaaagacttctttcgggatagtgtgcatgcat

SEQ ID NO: 1045 - DNA, 239 bp, Artificial Sequence
  source: /note="Description of Artificial Sequence: Synthetic polynucleotide"
atgaattctactcagttggtgagggtacaactgccaaaggagaggtccctgatggctacaatgtctccagattaaaaaaacagaatttccttggagtcggctgctccctcccaaacatctgtgtacttctgtgccagcagtggatcatcgtcgacaatgaaaaactgttttttggcagtggaacccagctctctgtcttgggtatgtaaaagacttctttcgggatagtgtgcatgcat

SEQ ID NO: 1046 - DNA, 239 bp, Artificial Sequence
  source: /note="Description of Artificial Sequence: Synthetic polynucleotide"
atgaattctattcaaatactgcaggtaccactggcaaaggagaagtccctgatggttatagtgtctccagagcaaacacagatgatttccttggcgtctgctgtaccctctcagacatctgtgtacttctgtgccagcagtgtgaacgtgtcgacaatgaaaaactgttttttggcagtggaacccagctctctgtcttgggtatgtaaaagacttctttcgggatagtgtgcatgcat

SEQ ID NO: 1047 - DNA, 239 bp, Artificial Sequence
  source: /note="Description of Artificial Sequence: Synthetic polynucleotide"
atgaattctactcagttggtgctggtatcactgaccaaggagaagtccccaatggctacaatgtctccagatcaaccacagaggatttccctgctgtcggctgctccctcccagacatctgtgtacttctgtgccagcagttgtcatcggtcgacaatgaaaaactgttttttggcagtggaacccagctctctgtcttgggtatgtaaaagacttctttcgggatagtgtgcatgcat

SEQ ID NO: 1048 - DNA, 239 bp, Artificial Sequence
  source: /note="Description of Artificial Sequence: Synthetic polynucleotide"
atgaattctattcagttggtgctggtatcactgacaaaggagaagtcccgaatggctacaacgtctccagatcaaccacagaggatttccctggagttggctgctccctcccagacatctgtgtacttctgtgccagcagtaggcttgagtcgacaatgaaaaactgttttttggcagtggaacccagctctctgtcttgggtatgtaaaagacttctttcgggatagtgtgcatgcat

SEQ ID NO: 1049 - DNA, 239 bp, Artificial Sequence
  source: /note="Description of Artificial Sequence: Synthetic polynucleotide"
atgaattctactcagttgctgctgctctcactgacaaaggagaagttcccaatggctacaatgtctccagatcaaacacagaggatttccctggagtcagctgctccctctcagacttctgtttacttctgtgccagcagtacacacgtgtcgacaatgaaaaactgttttttggcagtggaacccagctctctgtcttgggtatgtaaaagacttctttcgggatagtgtgcatgcat

SEQ ID NO: 1050 - DNA, 239 bp, Artificial Sequence
  source: /note="Description of Artificial Sequence: Synthetic polynucleotide"
atgaattctactactcagctgctgctggtactactgacaaagaagtccccaatggctacaatgtctctagattaaacacagaggatttccctggtgtcggctgctccctcccagacatctgtgtacttgtgtgccagcagttccacagtgtcgacaatgaaaaactgttttttggcagtggaacccagctctctgtcttgggtatgtaaaagacttctttcgggatagtgtgcatgcat

SEQ ID NO: 1051 - DNA, 239 bp, Artificial Sequence
  source: /note="Description of Artificial Sequence: Synthetic polynucleotide"
atgaattctactcagttgctgctggtatcactgacaaaggagaagtccccgatggctacaatgtatccagatcaaacacagaggatttccctggagtcagctgctccctcccagacatctgtatacttctgtgccagcagtcagtctgtgtcgacaatgaaaaactgttttttggcagtggaacccagctctctgtcttgggtatgtaaaagacttctttcgggatagtgtgcatgcat

SEQ ID NO: 1052 - DNA, 239 bp, Artificial Sequence
  source: /note="Description of Artificial Sequence: Synthetic polynucleotide"
atgaattcttccaaggcaaggatgcagcagacaaatcggggcttccccgtgatcggttctctgcacagaggtctgagggatccatctccattccagcgcacacagcagggggacttggctgtgtatctctgtgccagcagctccatgtggtcgacaatgaaaaactgttttttggcagtggaacccagctctctgtcttgggtatgtaaaagacttctttcgggatagtgtgcatgcat

SEQ ID NO: 1053 - DNA, 239 bp, Artificial Sequence
  source: /note="Description of Artificial Sequence: Synthetic polynucleotide"
atgaattcttccaaggcaacagtgcaccagacaaatcagggctgcccagtgatcgcttctctgcagagaggactgggggatccgtctccaatccagcgcacacagcaggaggactcggccgtgtatctctgtgccagcagctcactgcagtcgacaatgaaaaactgttttttggcagtggaacccagctctctgtcttgggtatgtaaaagacttctttcgggatagtgtgcatgcat

SEQ ID NO: 1054 - DNA, 239 bp, Artificial Sequence
  source: /note="Description of Artificial Sequence: Synthetic polynucleotide"
atgaattcttccaaggcacgggtgcggcagatgactcagggctgcccaacgatcggttctttgcagtcaggcctgagggatccgtctctaatccagcgcacagagcggggggactcagccgtgtatctctgtgccagcagccaagtcacgtcgacaatgaaaaactgttttttggcagtggaacccagctctctgtcttgggtatgtaaaagacttctttcgggatagtgtgcatgcat

SEQ ID NO: 1055 - DNA, 239 bp, Artificial Sequence
  source: /note="Description of Artificial Sequence: Synthetic polynucleotide"
atgaattctcccagagtgatgctcaacgagacaaatcagggcggcccagtggtcggttctctgcagagaggcctgagagatccgtctccaatccagcgcacagagcagggggactcagctgtgtatctctgtgccagcagctagacggagtcgacaatgaaaaactgttttttggcagtggaacccagctctctgtcttgggtatgtaaaagacttctttcgggatagtgtgcatgcat

SEQ ID NO: 1056 - DNA, 239 bp, Artificial Sequence
  source: /note="Description of Artificial Sequence: Synthetic polynucleotide"
atgaattcttcaattatgaagcccaacaagacaaatcagggctgcccaatgatcggttctctgcagagaggcctgagggatccatctccaatccagcgcacagagcagcgggactcggccatgtatcgctgtgccagcagcgagcgatagtcgacaatgaaaaactgttttttggcagtggaacccagctctctgtcttgggtatgtaaaagacttctttcgggatagtgtgcatgcat

SEQ ID NO: 1057 - DNA, 239 bp, Artificial Sequence
  source: /note="Description of Artificial Sequence: Synthetic polynucleotide"
atgaattcttcaattatgaagctcaaccagacaaatcagggctgcccagtgatcggttctctgcagagaggcctgagggatccatctccaattcagcgcacagagcagcgggactcagccatgtatcgctgtgccagcagcctcgagaagtcgacaatgaaaaactgttttttggcagtggaacccagctctctgtcttgggtatgtaaaagacttctttcgggatagtgtgcatgcat

SEQ ID NO: 1058 - DNA, 239 bp, Artificial Sequence
  source: /note="Description of Artificial Sequence: Synthetic polynucleotide"
atgaattcttccagaatgaagctcaactagacaaatcggggctgcccagtgatcgcttctttgcagaaaggcctgagggatccgtctccaatccagcgcacacagcaggaggactccgccgtgtatctctgtgccagcagcatgacaccgtcgacaatgaaaaactgttttttggcagtggaacccagctctctgtcttgggtatgtaaaagacttctttcgggatagtgtgcatgcat

SEQ ID NO: 1059 - DNA, 239 bp, Artificial Sequence
  source: /note="Description of Artificial Sequence: Synthetic polynucleotide"
atgaattcttccagaatgaagctcaactagaaaaatcaaggctgctcagtgatcggttctctgcagagaggcctaagggatctttctccaatccagcgcacagagcagggggactcggccatgtatctctgtgccagcagccttcacgagtcgacaatgaaaaactgttttttggcagtggaacccagctctctgtcttgggtatgtaaaagacttctttcgggatagtgtgcatgcat

SEQ ID NO: 1060 - DNA, 239 bp, Artificial Sequence
  source: /note="Description of Artificial Sequence: Synthetic polynucleotide"
atgaattctcagtattataatggagaagagagagcaaaaggaaacattcttgaacgattctccgcacaacagttccctgacttgcactctcctgagctctctggagctgggggactcagctttgtatttctgtgccagcagcgtagagtgtcgacaatgaaaaactgttttttggcagtggaacccagctctctgtcttgggtatgtaaaagacttctttcgggatagtgtgcatgcat

SEQ ID NO: 1061 - DNA, 239 bp, Artificial Sequence
  source: /note="Description of Artificial Sequence: Synthetic polynucleotide"
atgaattctactcatatggtgttcacgacactaacaaaggagaagtctcagatggctacagtgtctctagatcaaacacagaggacctccctggagtctgctgcctcctcccagacatctgtatatttctgcgccagcagttcgtcgatgtcgacaatgaaaaactgttttttggcagtggaacccagctctctgtcttgggtatgtaaaagacttctttcgggatagtgtgcatgcat

SEQ ID NO: 1062 - DNA, 239 bp, Artificial Sequence
  source: /note="Description of Artificial Sequence: Synthetic polynucleotide"
atgaattctactcagcagctgctgatattacagataaaggagaagtccccgatggctatgttgtctccagatccaagacagagaatttccctggagtcagctacccgctcccagacatctgtgtatttctgcgccagcagtagctagtggtcgacaatgaaaaactgttttttggcagtggaacccagctctctgtcttgggtatgtaaaagacttctttcgggatagtgtgcatgcat

SEQ ID NO: 1063 - DNA, 239 bp, Artificial Sequence
  source: /note="Description of Artificial Sequence: Synthetic polynucleotide"
atgaattctactcatatggtgttaaagatactgacaaaggagaagtctcagatggctatagtgtctctagatcaaagacagaggatttccctggagtccgctaccagctcccagacatctgtgtacttctgtgccatcagttgagacctgtcgacaatgaaaaactgttttttggcagtggaacccagctctctgtcttgggtatgtaaaagacttctttcgggatagtgtgcatgcat

SEQ ID NO: 1064 - DNA, 239 bp, Artificial Sequence
  source: /note="Description of Artificial Sequence: Synthetic polynucleotide"
atgaattctttcaggatgagagtgtagtagatgattcacagttgcctaaggatcgattttctgcagagaggctcaaaggagtagactccaatccagcctgcagagcttggggactcggccatgtatctctgtgccagcagcgatggcttgtcgacaatgaaaaactgttttttggcagtggaacccagctctctgtcttgggtatgtaaaagacttctttcgggatagtgtgcatgcat

SEQ ID NO: 1065 - DNA, 239 bp, Artificial Sequence
  source: /note="Description of Artificial Sequence: Synthetic polynucleotide"
atgaattctttcagaataacggtgtagtggatgattcacagttgcctaaggatcgattttctgcagagaggctcaaaggagtagactccaatccagcctgcaaagcttgaggactcggccgtgtatctctgtgccagcagcgcatctgagtcgacaatgaaaaactgttttttggcagtggaacccagctctctgtcttgggtatgtaaaagacttctttcgggatagtgtgcatgcat

SEQ ID NO: 1066 - DNA, 239 bp, Artificial Sequence
  source: /note="Description of Artificial Sequence: Synthetic polynucleotide"
atgaattctatgagaatgaggaagcagtagacgattcacagttgcctaaggatcgattttctgcagagaggctcaaaggagtagactccaatccagcctgcagagcttggggactcggccgtgtatctctgtgccagcagcgacactctgtcgacaatgaaaaactgttttttggcagtggaacccagctctctgtcttgggtatgtaaaagacttctttcgggatagtgtgcatgcat

SEQ ID NO: 1067 - DNA, 239 bp, Artificial Sequence
  source: /note="Description of Artificial Sequence: Synthetic polynucleotide"
atgaattctttaacaacaacgttccgatagatgattcagggatgcccgaggatcgattctcagctaagatgcctaatgcatcattctccaatccagccctcagaacccagggactcagctgtgtacttctgtgccagcagttgctacacgtcgacaatgaaaaactgttttttggcagtggaacccagctctctgtcttgggtatgtaaaagacttctttcgggatagtgtgcatgcat

SEQ ID NO: 1068 - DNA, 239 bp, Artificial Sequence
  source: /note="Description of Artificial Sequence: Synthetic polynucleotide"
atgaattctttaacaacaacgttccgatagatgattcagggatgcccgaggatcgattctcagctaagatgcctaatgcatcattctccaatccagccctcagaacccagggactcagctgtgtacttctgtgccagcagttcagcttggtcgacaatgaaaaactgttttttggcagtggaacccagctctctgtcttgggtatgtaaaagacttctttcgggatagtgtgcatgcat

SEQ ID NO: 1069 - DNA, 239 bp, Artificial Sequence
  source: /note="Description of Artificial Sequence: Synthetic polynucleotide"
atgaattcttccgcaaccgggctcctctagatgattcggggatgccgaaggatcgattctcagcagagatgcctgatgcaactttagccaatccagccctcagaacccagggactcagctgtgtatttttgtgctagtggtttcggaacgtcgacaatgaaaaactgttttttggcagtggaacccagctctctgtcttgggtatgtaaaagacttctttcgggatagtgtgcatgcat

SEQ ID NO: 1070 - DNA, 239 bp, Artificial Sequence
  source: /note="Description of Artificial Sequence: Synthetic polynucleotide"
atgaattctcgttttatgaaaagatgcagagcgataaaggaagcatccctgatcgattctcagctcaacagttcagtgactatcattctgatgagctccttggagctgggggactcagccctgtacttctgtgccagcagcgcaattcggtcgacaatgaaaaactgttttttggcagtggaacccagctctctgtcttgggtatgtaaaagacttctttcgggatagtgtgcatgcat

SEQ ID NO: 1071 - DNA, 239 bp, Artificial Sequence
  source: /note="Description of Artificial Sequence: Synthetic polynucleotide"
atgaattctttgtgaaagagtctaaacaggatgagtccggtatgcccaacaatcgattcttagctgaaaggactggagggacgtattctagtgcagcctgcagaactggaggattctggagtttatttctgtgccagcagccaagaggtgtcgacaatgaaaaactgttttttggcagtggaacccagctctctgtcttgggtatgtaaaagacttctttcgggatagtgtgcatgcat

SEQ ID NO: 1072 - DNA, 239 bp, Artificial Sequence
  source: /note="Description of Artificial Sequence: Synthetic polynucleotide"
atgaattccactactatgacaaagattttaacaatgaagcagacacccctgataacttccaatccaggaggccgaacacttctttctgctatccgctcaccaggcctgggggacgcagccatgtacctgtgtgccaccagcgaatggacgtcgacaatgaaaaactgttttttggcagtggaacccagctctctgtcttgggtatgtaaaagacttctttcgggatagtgtgcatgcat

SEQ ID NO: 1073 - DNA, 239 bp, Artificial Sequence
  source: /note="Description of Artificial Sequence: Synthetic polynucleotide"
atgaattcttccagaatgaaaatgtctttgatgaaacaggtatgcccaaggaaagattttcagctaagtgcctcccaaattcaccctgtaatccaggctacgaagcttgaggattcagcagtgtatttttgtgccagcagcaactgccagtcgacaatgaaaaactgttttttggcagtggaacccagctctctgtcttgggtatgtaaaagacttctttcgggatagtgtgcatgcat

SEQ ID NO: 1074 - DNA, 239 bp, Artificial Sequence
  source: /note="Description of Artificial Sequence: Synthetic polynucleotide"
atgaattctccttccagtaccaaaacattgcagttgattcagggatgcccaaggaacgattcacagctgaaagacctaacggaacgtcttaagatccatcccgcagagccgagggactcagccgtgtatctctacagtagccctagtaggtcgacaatgaaaaactgttttttggcagtggaacccagctctctgtcttgggtatgtaaaagacttctttcgggatagtgtgcatgcat

SEQ ID NO: 1075 - DNA, 239 bp, Artificial Sequence
  source: /note="Description of Artificial Sequence: Synthetic polynucleotide"
atgaattcctccagaaagaaaatatcatagatgagtcaggaatgccaaaggaacgattttctgctgaatttcccaaagagggccccagcaatccagcaggtagtgcgaggagattcggcagcttatttctgtgccagctcactgacgttgtcgacaatgaaaaactgttttttggcagtggaacccagctctctgtcttgggtatgtaaaagacttctttcgggatagtgtgcatgcat

SEQ ID NO: 1076 - DNA, 239 bp, Artificial Sequence
  source: /note="Description of Artificial Sequence: Synthetic polynucleotide"
atgaattctactcacagatagtaaatgactttcagaaaggagatatagctgaagggtacagcgtctctcgggagaagaaggaatcctttcgtgacatcggcccaaaagaacccgacagctttctatctctgtgccagtagttgcagacagtcgacaatgaaaaactgttttttggcagtggaacccagctctctgtcttgggtatgtaaaagacttctttcgggatagtgtgcatgcat

SEQ ID NO: 1077 - DNA, 239 bp, Artificial Sequence
  source: /note="Description of Artificial Sequence: Synthetic polynucleotide"
atgaattctccaatgagggctccaaggccacatacgagcaaggcgtcgagaaggacaagtttctcatcaaccatgcaagcctgaccttgtacagtgaccagtgcccatcctgaagacagcagcttctacatctgcagtgctagttgaccgtcgacaatgaaaaactgttttttggcagtggaacccagctctctgtcttgggtatgtaaaagacttctttcgggatagtgtgcatgcat

SEQ ID NO: 1078 - DNA, 239 bp, Artificial Sequence
  source: /note="Description of Artificial Sequence: Synthetic polynucleotide"
atgaattcactcctttgatgtcaaagatataaacaaaggagagatctctgatggatacagtgtctctcgacaggcacaggctaaattctctagagtctgccatccccaaccagacagctctttacttctgtgccaccagtggtctcctagtcgacaatgaaaaactgttttttggcagtggaacccagctctctgtcttgggtatgtaaaagacttctttcgggatagtgtgcatgcat

SEQ ID NO: 1079 - DNA, 239 bp, Artificial Sequence
  source: /note="Description of Artificial Sequence: Synthetic polynucleotide"
atgaattctattcctatggagttaattccacagagaagggagatctttcctctgagtcaacagtctccagaataaggacggagcattttcctggagtctgccaggccctcacatacctctcagtacctctgtgccagcagtctgcaatcgtcgacaatgaaaaactgttttttggcagtggaacccagctctctgtcttgggtatgtaaaagacttctttcgggatagtgtgcatgcat

SEQ ID NO: 1080 - DNA, 239 bp, Artificial Sequence
  source: /note="Description of Artificial Sequence: Synthetic polynucleotide"
atgaattctattcaatgaatgttgaggtgactgataagggagatgttcctgaagggtacaaagtctctcgaaaagagaagaggaatttccctggagtcgcccagccccaaccagacctctctgtacttctgtgccagcagttgagcgaagtcgacaatgaaaaactgttttttggcagtggaacccagctctctgtcttgggtatgtaaaagacttctttcgggatagtgtgcatgcat

SEQ ID NO: 1081 - DNA, 239 bp, Artificial Sequence
  source: /note="Description of Artificial Sequence: Synthetic polynucleotide"
atgaattcttctcatatgatgttaaaatgaaagaaaaaggagatattcctgaggggtacagtgtctctagagagaagaaggagcgcttctctggagtccgccagcaccaaccagacatctatgtacctctgtgccagcagtttggactggtcgacaatgaaaaactgttttttggcagtggaacccagctctctgtcttgggtatgtaaaagacttctttcgggatagtgtgcatgcat

SEQ ID NO: 1082 - DNA, 239 bp, Artificial Sequence
  source: /note="Description of Artificial Sequence: Synthetic polynucleotide"
atgaattcgcaaatcagggctctgaggccacatatgagagtggatttgtcattgacaagtttcccatcagccgcccaaacctaacattctactgtgagcaacatgagccctgaagacagcagcatatatctctgcagcgttagcaatccgtcgacaatgaaaaactgttttttggcagtggaacccagctctctgtcttgggtatgtaaaagacttctttcgggatagtgtgcatgcat

SEQ ID NO: 1083 - DNA, 239 bp, Artificial Sequence
  source: /note="Description of Artificial Sequence: Synthetic polynucleotide"
atgaattcctcttctactccgttggtattggccagatcagctctgaggtgccccagaatctctcagcctccagaccccaggaccggcagtagttctaagaagctccttctcagtgactctggcttctatctctgtgcctggcgaactacgtcgacaatgaaaaactgttttttggcagtggaacccagctctctgtcttgggtatgtaaaagacttctttcgggatagtgtgcatgcat

SEQ ID NO: 1084 - DNA, 239 bp, Artificial Sequence
  source: /note="Description of Artificial Sequence: Synthetic polynucleotide"
atgaattcttttataataatgaaatctcagagaagtctgaaatattcgatgatcaattctcagttgaaaggcctgatggatcaaatttcaatccggtccacaaagctggaggactcagccatgtacttctgtgccagcagtcaaggtcagtcgacatcagccccagcattttggtgatgggactcgactctccatcctaggtaagttgcagaatcagggtggtatggccatgcatgcat

SEQ ID NO: 1085 - DNA, 239 bp, Artificial Sequence
  source: /note="Description of Artificial Sequence: Synthetic polynucleotide"
atgaattcagctacaataataaggagctcattataaatgaaacagttccaaatcgcttctcacctaaatctccagacaaagctcacttaaatcaattccctggagcttggtgactctgctgtgtatttctgtgccagcagctacgtacggtcgacatcagccccagcattttggtgatgggactcgactctccatcctaggtaagttgcagaatcagggtggtatggccatgcatgcat

SEQ ID NO: 1086 - DNA, 239 bp, Artificial Sequence
  source: /note="Description of Artificial Sequence: Synthetic polynucleotide"
atgaattcgtctacagctatgagaaactctctataaatgaaagtgtgccaagtcgcttctcacctgaatgccccaacagctctctcttaactacacgccctgcagccagaagactcagccctgtatctctgcgccagcagctacgcgttgtcgacatcagccccagcattttggtgatgggactcgactctccatcctaggtaagttgcagaatcagggtggtatggccatgcatgcat

SEQ ID NO: 1087 - DNA, 239 bp, Artificial Sequence
  source: /note="Description of Artificial Sequence: Synthetic polynucleotide"
atgaattcgtctacaactttaaagaacagactgaaaacaacagtgtgccaagtcgcttctcacctgaatgccccaacagctctcacttatctacacaccctgcagccagaagactcggccctgtatctctgcgccagcagcctcagtgagtcgacatcagccccagcattttggtgatgggactcgactctccatcctaggtaagttgcagaatcagggtggtatggccatgcatgcat

SEQ ID NO: 1088 - DNA, 239 bp, Artificial Sequence
  source: /note="Description of Artificial Sequence: Synthetic polynucleotide"
atgaattcgtctacagtcttgaagaacgggttgaaaacaacagtgtgccaagtcgcttctcacctgaatgccccaacagctctcacttatctacacaccctgcagccagaagactcggccctgtatctctgcgccagcagcgtgtctacgtcgacatcagccccagcattttggtgatgggactcgactctccatcctaggtaagttgcagaatcagggtggtatggccatgcatgcat

SEQ ID NO: 1089 - DNA, 239 bp, Artificial Sequence
  source: /note="Description of Artificial Sequence: Synthetic polynucleotide"
atgaattctgaatacttcagtgagacacagagaaacaaaggaaacttccctggtcgattctcagggcgccagttctctaactctcgctcttgtgagcaccttggagctgggggactcggccctttatctttgcgccagcagagtaccgagtcgacatcagccccagcattttggtgatgggactcgactctccatcctaggtaagttgcagaatcagggtggtatggccatgcatgcat

SEQ ID NO: 1090 - DNA, 239 bp, Artificial Sequence
  source: /note="Description of Artificial Sequence: Synthetic polynucleotide"
atgaattctgaatatgctaatgagttaaggagatcagaaggaaacttccctaatcgattctcagggcgccagttccatgactgttgctcttgtgagtgccttggagctgggggactcggccctgtatctctgtgccagaagttgcctcagtcgacatcagccccagcattttggtgatgggactcgactctccatcctaggtaagttgcagaatcagggtggtatggccatgcatgcat

SEQ ID NO: 1091 - DNA, 239 bp, Artificial Sequence
  source: /note="Description of Artificial Sequence: Synthetic polynucleotide"
atgaattctcagtattatagggaggaagagaatggcagaggaaacttccctcctagattctcaggtctccagttccctaattatagctcttgtgaacgccttggagctggacgactcggccctgtatctctgtgccagcagtcgttagcgtcgacatcagccccagcattttggtgatgggactcgactctccatcctaggtaagttgcagaatcagggtggtatggccatgcatgcat

SEQ ID NO: 1092 - DNA, 239 bp, Artificial Sequence
  source: /note="Description of Artificial Sequence: Synthetic polynucleotide"
atgaattctcagtattatgagaaagaagagagaggaagaggaaacttccctgatcgattctcagctcgccagttccctaactatagctcttgtgaacgccttgttgctgggggactcggccctgtatctctgtgccagcagtggacatggtcgacatcagccccagcattttggtgatgggactcgactctccatcctaggtaagttgcagaatcagggtggtatggccatgcatgcat

SEQ ID NO: 1093 - DNA, 239 bp, Artificial Sequence
  source: /note="Description of Artificial Sequence: Synthetic polynucleotide"
atgaattctcagtattatgaggaggaagagagacagagaggcaacttccctgatcgattctcaggtcaccagttccctaactatagctcttgtgaacgccttgttgctgggggactcggccctctatctctgtgccagcagaggttgctgtcgacatcagccccagcattttggtgatgggactcgactctccatcctaggtaagttgcagaatcagggtggtatggccatgcatgcat

SEQ ID NO: 1094 - DNA, 239 bp, Artificial Sequence
  source: /note="Description of Artificial Sequence: Synthetic polynucleotide"
atgaattctcagtattatgagaaagaagagagaggaagaggaaacttccctgatcaattctcaggtcaccagttccctaactatagctcttgtgaacgccttgttgctaggggactcggccctctatctctgtgccagcaggtacagtggtcgacatcagccccagcattttggtgatgggactcgactctccatcctaggtaagttgcagaatcagggtggtatggccatgcatgcat

SEQ ID NO: 1095 - DNA, 239 bp, Artificial Sequence
  source: /note="Description of Artificial Sequence: Synthetic polynucleotide"
atgaattcttggtatgacgagggtgaagagagaaacagaggaaacttccctcctagattttcaggtcgccagttccctaattatagctcttgtgaacgccttggagctggaggactcggccctgtatctctgtgccagcagatccatgggtcgacatcagccccagcattttggtgatgggactcgactctccatcctaggtaagttgcagaatcagggtggtatggccatgcatgcat

SEQ ID NO: 1096 - DNA, 239 bp, Artificial Sequence
  source: /note="Description of Artificial Sequence: Synthetic polynucleotide"
atgaattctactcagcttctgagggtaccactgacaaaggagaagtccccaatggctacaatgtctccagattaaacaaacgggagttctctggagtcggctgctccctcccagacatctgtgtacttctgtgccagcagttgatgcgagtcgacatcagccccagcattttggtgatgggactcgactctccatcctaggtaagttgcagaatcagggtggtatggccatgcatgcat

SEQ ID NO: 1097 - DNA, 239 bp, Artificial Sequence
  source: /note="Description of Artificial Sequence: Synthetic polynucleotide"
atgaattctactcagttggtgagggtacaactgccaaaggagaggtccctgatggctacaatgtctccagattaaaaaaacagaatttccttggagtcggctgctccctcccaaacatctgtgtacttctgtgccagcagtgtagcagtgtcgacatcagccccagcattttggtgatgggactcgactctccatcctaggtaagttgcagaatcagggtggtatggccatgcatgcat

SEQ ID NO: 1098 - DNA, 239 bp, Artificial Sequence
  source: /note="Description of Artificial Sequence: Synthetic polynucleotide"
atgaattctactcagttggtgagggtacaactgccaaaggagaggtccctgatggctacaatgtctccagattaaaaaaacagaatttccttggagtcggctgctccctcccaaacatctgtgtacttctgtgccagcagtggatcatcgtcgacatcagccccagcattttggtgatgggactcgactctccatcctaggtaagttgcagaatcagggtggtatggccatgcatgcat

SEQ ID NO: 1099 - DNA, 239 bp, Artificial Sequence
  source: /note="Description of Artificial Sequence: Synthetic polynucleotide"
atgaattctattcaaatactgcaggtaccactggcaaaggagaagtccctgatggttatagtgtctccagagcaaacacagatgatttccttggcgtctgctgtaccctctcagacatctgtgtacttctgtgccagcagtgtgaacgtgtcgacatcagccccagcattttggtgatgggactcgactctccatcctaggtaagttgcagaatcagggtggtatggccatgcatgcat

SEQ ID NO: 1100 - DNA, 239 bp, Artificial Sequence
  source: /note="Description of Artificial Sequence: Synthetic polynucleotide"
atgaattctactcagttggtgctggtatcactgaccaaggagaagtccccaatggctacaatgtctccagatcaaccacagaggatttccctgctgtcggctgctccctcccagacatctgtgtacttctgtgccagcagttgtcatcggtcgacatcagccccagcattttggtgatgggactcgactctccatcctaggtaagttgcagaatcagggtggtatggccatgcatgcat

SEQ ID NO: 1101 - DNA, 239 bp, Artificial Sequence
  source: /note="Description of Artificial Sequence: Synthetic polynucleotide"
atgaattctattcagttggtgctggtatcactgacaaaggagaagtcccgaatggctacaacgtctccagatcaaccacagaggatttccctggagttggctgctccctcccagacatctgtgtacttctgtgccagcagtaggcttgagtcgacatcagccccagcattttggtgatgggactcgactctccatcctaggtaagttgcagaatcagggtggtatggccatgcatgcat

SEQ ID NO: 1102 - DNA, 239 bp, Artificial Sequence
  source: /note="Description of Artificial Sequence: Synthetic polynucleotide"
atgaattctactcagttgctgctgctctcactgacaaaggagaagttcccaatggctacaatgtctccagatcaaacacagaggatttccctggagtcagctgctccctctcagacttctgtttacttctgtgccagcagtacacacgtgtcgacatcagccccagcattttggtgatgggactcgactctccatcctaggtaagttgcagaatcagggtggtatggccatgcatgcat

SEQ ID NO: 1103 - DNA, 239 bp, Artificial Sequence
  source: /note="Description of Artificial Sequence: Synthetic polynucleotide"
atgaattctactactcagctgctgctggtactactgacaaagaagtccccaatggctacaatgtctctagattaaacacagaggatttccctggtgtcggctgctccctcccagacatctgtgtacttgtgtgccagcagttccacagtgtcgacatcagccccagcattttggtgatgggactcgactctccatcctaggtaagttgcagaatcagggtggtatggccatgcatgcat

SEQ ID NO: 1104 - DNA, 239 bp, Artificial Sequence
  source: /note="Description of Artificial Sequence: Synthetic polynucleotide"
atgaattctactcagttgctgctggtatcactgacaaaggagaagtccccgatggctacaatgtatccagatcaaacacagaggatttccctggagtcagctgctccctcccagacatctgtatacttctgtgccagcagtcagtctgtgtcgacatcagccccagcattttggtgatgggactcgactctccatcctaggtaagttgcagaatcagggtggtatggccatgcatgcat

SEQ ID NO: 1105 - DNA, 239 bp, Artificial Sequence
  source: /note="Description of Artificial Sequence: Synthetic polynucleotide"
atgaattcttccaaggcaaggatgcagcagacaaatcggggcttccccgtgatcggttctctgcacagaggtctgagggatccatctccattccagcgcacacagcagggggacttggctgtgtatctctgtgccagcagctccatgtggtcgacatcagccccagcattttggtgatgggactcgactctccatcctaggtaagttgcagaatcagggtggtatggccatgcatgcat

SEQ ID NO: 1106 - DNA, 239 bp, Artificial Sequence
  source: /note="Description of Artificial Sequence: Synthetic polynucleotide"
atgaattcttccaaggcaacagtgcaccagacaaatcagggctgcccagtgatcgcttctctgcagagaggactgggggatccgtctccaatccagcgcacacagcaggaggactcggccgtgtatctctgtgccagcagctcactgcagtcgacatcagccccagcattttggtgatgggactcgactctccatcctaggtaagttgcagaatcagggtggtatggccatgcatgcat

SEQ ID NO: 1107 - DNA, 239 bp, Artificial Sequence
  source: /note="Description of Artificial Sequence: Synthetic polynucleotide"
atgaattcttccaaggcacgggtgcggcagatgactcagggctgcccaacgatcggttctttgcagtcaggcctgagggatccgtctctaatccagcgcacagagcggggggactcagccgtgtatctctgtgccagcagccaagtcacgtcgacatcagccccagcattttggtgatgggactcgactctccatcctaggtaagttgcagaatcagggtggtatggccatgcatgcat

SEQ ID NO: 1108 - DNA, 239 bp, Artificial Sequence
  source: /note="Description of Artificial Sequence: Synthetic polynucleotide"
atgaattctcccagagtgatgctcaacgagacaaatcagggcggcccagtggtcggttctctgcagagaggcctgagagatccgtctccaatccagcgcacagagcagggggactcagctgtgtatctctgtgccagcagctagacggagtcgacatcagccccagcattttggtgatgggactcgactctccatcctaggtaagttgcagaatcagggtggtatggccatgcatgcat

SEQ ID NO: 1109 - DNA, 239 bp, Artificial Sequence
  source: /note="Description of Artificial Sequence: Synthetic polynucleotide"
atgaattcttcaattatgaagcccaacaagacaaatcagggctgcccaatgatcggttctctgcagagaggcctgagggatccatctccaatccagcgcacagagcagcgggactcggccatgtatcgctgtgccagcagcgagcgatagtcgacatcagccccagcattttggtgatgggactcgactctccatcctaggtaagttgcagaatcagggtggtatggccatgcatgcat

SEQ ID NO: 1110 - DNA, 239 bp, Artificial Sequence
  source: /note="Description of Artificial Sequence: Synthetic polynucleotide"
atgaattcttcaattatgaagctcaaccagacaaatcagggctgcccagtgatcggttctctgcagagaggcctgagggatccatctccaattcagcgcacagagcagcgggactcagccatgtatcgctgtgccagcagcctcgagaagtcgacatcagccccagcattttggtgatgggactcgactctccatcctaggtaagttgcagaatcagggtggtatggccatgcatgcat

SEQ ID NO: 1111 - DNA, 239 bp, Artificial Sequence
  source: /note="Description of Artificial Sequence: Synthetic polynucleotide"
atgaattcttccagaatgaagctcaactagacaaatcggggctgcccagtgatcgcttctttgcagaaaggcctgagggatccgtctccaatccagcgcacacagcaggaggactccgccgtgtatctctgtgccagcagcatgacaccgtcgacatcagccccagcattttggtgatgggactcgactctccatcctaggtaagttgcagaatcagggtggtatggccatgcatgcat

SEQ ID NO: 1112 - DNA, 239 bp, Artificial Sequence
  source: /note="Description of Artificial Sequence: Synthetic polynucleotide"
atgaattcttccagaatgaagctcaactagaaaaatcaaggctgctcagtgatcggttctctgcagagaggcctaagggatctttctccaatccagcgcacagagcagggggactcggccatgtatctctgtgccagcagccttcacgagtcgacatcagccccagcattttggtgatgggactcgactctccatcctaggtaagttgcagaatcagggtggtatggccatgcatgcat

SEQ ID NO: 1113 - DNA, 239 bp, Artificial Sequence
  source: /note="Description of Artificial Sequence: Synthetic polynucleotide"
atgaattctcagtattataatggagaagagagagcaaaaggaaacattcttgaacgattctccgcacaacagttccctgacttgcactctcctgagctctctggagctgggggactcagctttgtatttctgtgccagcagcgtagagtgtcgacatcagccccagcattttggtgatgggactcgactctccatcctaggtaagttgcagaatcagggtggtatggccatgcatgcat

SEQ ID NO: 1114 - DNA, 239 bp, Artificial Sequence
  source: /note="Description of Artificial Sequence: Synthetic polynucleotide"
atgaattctactcatatggtgttcacgacactaacaaaggagaagtctcagatggctacagtgtctctagatcaaacacagaggacctccctggagtctgctgcctcctcccagacatctgtatatttctgcgccagcagttcgtcgatgtcgacatcagccccagcattttggtgatgggactcgactctccatcctaggtaagttgcagaatcagggtggtatggccatgcatgcat

SEQ ID NO: 1115 - DNA, 239 bp, Artificial Sequence
  source: /note="Description of Artificial Sequence: Synthetic polynucleotide"
atgaattctactcagcagctgctgatattacagataaaggagaagtccccgatggctatgttgtctccagatccaagacagagaatttccctggagtcagctacccgctcccagacatctgtgtatttctgcgccagcagtagctagtggtcgacatcagccccagcattttggtgatgggactcgactctccatcctaggtaagttgcagaatcagggtggtatggccatgcatgcat

SEQ ID NO: 1116 - DNA, 239 bp, Artificial Sequence
  source: /note="Description of Artificial Sequence: Synthetic polynucleotide"
atgaattctactcatatggtgttaaagatactgacaaaggagaagtctcagatggctatagtgtctctagatcaaagacagaggatttccctggagtccgctaccagctcccagacatctgtgtacttctgtgccatcagttgagacctgtcgacatcagccccagcattttggtgatgggactcgactctccatcctaggtaagttgcagaatcagggtggtatggccatgcatgcat

SEQ ID NO: 1117 - DNA, 239 bp, Artificial Sequence
  source: /note="Description of Artificial Sequence: Synthetic polynucleotide"
atgaattctttcaggatgagagtgtagtagatgattcacagttgcctaaggatcgattttctgcagagaggctcaaaggagtagactccaatccagcctgcagagcttggggactcggccatgtatctctgtgccagcagcgatggcttgtcgacatcagccccagcattttggtgatgggactcgactctccatcctaggtaagttgcagaatcagggtggtatggccatgcatgcat

SEQ ID NO: 1118 - DNA, 239 bp, Artificial Sequence
  source: /note="Description of Artificial Sequence: Synthetic polynucleotide"
atgaattctttcagaataacggtgtagtggatgattcacagttgcctaaggatcgattttctgcagagaggctcaaaggagtagactccaatccagcctgcaaagcttgaggactcggccgtgtatctctgtgccagcagcgcatctgagtcgacatcagccccagcattttggtgatgggactcgactctccatcctaggtaagttgcagaatcagggtggtatggccatgcatgcat

SEQ ID NO: 1119 - DNA, 239 bp, Artificial Sequence
  source: /note="Description of Artificial Sequence: Synthetic polynucleotide"
atgaattctatgagaatgaggaagcagtagacgattcacagttgcctaaggatcgattttctgcagagaggctcaaaggagtagactccaatccagcctgcagagcttggggactcggccgtgtatctctgtgccagcagcgacactctgtcgacatcagccccagcattttggtgatgggactcgactctccatcctaggtaagttgcagaatcagggtggtatggccatgcatgcat

SEQ ID NO: 1120 - DNA, 239 bp, Artificial Sequence
  source: /note="Description of Artificial Sequence: Synthetic polynucleotide"
atgaattctttaacaacaacgttccgatagatgattcagggatgcccgaggatcgattctcagctaagatgcctaatgcatcattctccaatccagccctcagaacccagggactcagctgtgtacttctgtgccagcagttgctacacgtcgacatcagccccagcattttggtgatgggactcgactctccatcctaggtaagttgcagaatcagggtggtatggccatgcatgcat

SEQ ID NO: 1121 - DNA, 239 bp, Artificial Sequence
  source: /note="Description of Artificial Sequence: Synthetic polynucleotide"
atgaattctttaacaacaacgttccgatagatgattcagggatgcccgaggatcgattctcagctaagatgcctaatgcatcattctccaatccagccctcagaacccagggactcagctgtgtacttctgtgccagcagttcagcttggtcgacatcagccccagcattttggtgatgggactcgactctccatcctaggtaagttgcagaatcagggtggtatggccatgcatgcat

SEQ ID NO: 1122 - DNA, 239 bp, Artificial Sequence
  source: /note="Description of Artificial Sequence: Synthetic polynucleotide"
atgaattcttccgcaaccgggctcctctagatgattcggggatgccgaaggatcgattctcagcagagatgcctgatgcaactttagccaatccagccctcagaacccagggactcagctgtgtatttttgtgctagtggtttcggaacgtcgacatcagccccagcattttggtgatgggactcgactctccatcctaggtaagttgcagaatcagggtggtatggccatgcatgcat

SEQ ID NO: 1123 - DNA, 239 bp, Artificial Sequence
  source: /note="Description of Artificial Sequence: Synthetic polynucleotide"
atgaattctcgttttatgaaaagatgcagagcgataaaggaagcatccctgatcgattctcagctcaacagttcagtgactatcattctgatgagctccttggagctgggggactcagccctgtacttctgtgccagcagcgcaattcggtcgacatcagccccagcattttggtgatgggactcgactctccatcctaggtaagttgcagaatcagggtggtatggccatgcatgcat

SEQ ID NO: 1124 - DNA, 239 bp, Artificial Sequence
  source: /note="Description of Artificial Sequence: Synthetic polynucleotide"
atgaattctttgtgaaagagtctaaacaggatgagtccggtatgcccaacaatcgattcttagctgaaaggactggagggacgtattctagtgcagcctgcagaactggaggattctggagtttatttctgtgccagcagccaagaggtgtcgacatcagccccagcattttggtgatgggactcgactctccatcctaggtaagttgcagaatcagggtggtatggccatgcatgcat

SEQ ID NO: 1125 - DNA, 239 bp, Artificial Sequence
  source: /note="Description of Artificial Sequence: Synthetic polynucleotide"
atgaattccactactatgacaaagattttaacaatgaagcagacacccctgataacttccaatccaggaggccgaacacttctttctgctatccgctcaccaggcctgggggacgcagccatgtacctgtgtgccaccagcgaatggacgtcgacatcagccccagcattttggtgatgggactcgactctccatcctaggtaagttgcagaatcagggtggtatggccatgcatgcat

SEQ ID NO: 1126 - DNA, 239 bp, Artificial Sequence
  source: /note="Description of Artificial Sequence: Synthetic polynucleotide"
atgaattcttccagaatgaaaatgtctttgatgaaacaggtatgcccaaggaaagattttcagctaagtgcctcccaaattcaccctgtaatccaggctacgaagcttgaggattcagcagtgtatttttgtgccagcagcaactgccagtcgacatcagccccagcattttggtgatgggactcgactctccatcctaggtaagttgcagaatcagggtggtatggccatgcatgcat

SEQ ID NO: 1127 - DNA, 239 bp, Artificial Sequence
  source: /note="Description of Artificial Sequence: Synthetic polynucleotide"
atgaattctccttccagtaccaaaacattgcagttgattcagggatgcccaaggaacgattcacagctgaaagacctaacggaacgtcttaagatccatcccgcagagccgagggactcagccgtgtatctctacagtagccctagtaggtcgacatcagccccagcattttggtgatgggactcgactctccatcctaggtaagttgcagaatcagggtggtatggccatgcatgcat

SEQ ID NO: 1128 - DNA, 239 bp, Artificial Sequence
  source: /note="Description of Artificial Sequence: Synthetic polynucleotide"
atgaattcctccagaaagaaaatatcatagatgagtcaggaatgccaaaggaacgattttctgctgaatttcccaaagagggccccagcaatccagcaggtagtgcgaggagattcggcagcttatttctgtgccagctcactgacgttgtcgacatcagccccagcattttggtgatgggactcgactctccatcctaggtaagttgcagaatcagggtggtatggccatgcatgcat

SEQ ID NO: 1129 - DNA, 239 bp, Artificial Sequence
  source: /note="Description of Artificial Sequence: Synthetic polynucleotide"
atgaattctactcacagatagtaaatgactttcagaaaggagatatagctgaagggtacagcgtctctcgggagaagaaggaatcctttcgtgacatcggcccaaaagaacccgacagctttctatctctgtgccagtagttgcagacagtcgacatcagccccagcattttggtgatgggactcgactctccatcctaggtaagttgcagaatcagggtggtatggccatgcatgcat

SEQ ID NO: 1130 - DNA, 239 bp, Artificial Sequence
  source: /note="Description of Artificial Sequence: Synthetic polynucleotide"
atgaattctccaatgagggctccaaggccacatacgagcaaggcgtcgagaaggacaagtttctcatcaaccatgcaagcctgaccttgtacagtgaccagtgcccatcctgaagacagcagcttctacatctgcagtgctagttgaccgtcgacatcagccccagcattttggtgatgggactcgactctccatcctaggtaagttgcagaatcagggtggtatggccatgcatgcat

SEQ ID NO: 1131 - DNA, 239 bp, Artificial Sequence
  source: /note="Description of Artificial Sequence: Synthetic polynucleotide"
atgaattcactcctttgatgtcaaagatataaacaaaggagagatctctgatggatacagtgtctctcgacaggcacaggctaaattctctagagtctgccatccccaaccagacagctctttacttctgtgccaccagtggtctcctagtcgacatcagccccagcattttggtgatgggactcgactctccatcctaggtaagttgcagaatcagggtggtatggccatgcatgcat

SEQ ID NO: 1132 - DNA, 239 bp, Artificial Sequence
  source: /note="Description of Artificial Sequence: Synthetic polynucleotide"
atgaattctattcctatggagttaattccacagagaagggagatctttcctctgagtcaacagtctccagaataaggacggagcattttcctggagtctgccaggccctcacatacctctcagtacctctgtgccagcagtctgcaatcgtcgacatcagccccagcattttggtgatgggactcgactctccatcctaggtaagttgcagaatcagggtggtatggccatgcatgcat

SEQ ID NO: 1133 - DNA, 239 bp, Artificial Sequence
  source: /note="Description of Artificial Sequence: Synthetic polynucleotide"
atgaattctattcaatgaatgttgaggtgactgataagggagatgttcctgaagggtacaaagtctctcgaaaagagaagaggaatttccctggagtcgcccagccccaaccagacctctctgtacttctgtgccagcagttgagcgaagtcgacatcagccccagcattttggtgatgggactcgactctccatcctaggtaagttgcagaatcagggtggtatggccatgcatgcat

SEQ ID NO: 1134 - DNA, 239 bp, Artificial Sequence
  source: /note="Description of Artificial Sequence: Synthetic polynucleotide"
atgaattcttctcatatgatgttaaaatgaaagaaaaaggagatattcctgaggggtacagtgtctctagagagaagaaggagcgcttctctggagtccgccagcaccaaccagacatctatgtacctctgtgccagcagtttggactggtcgacatcagccccagcattttggtgatgggactcgactctccatcctaggtaagttgcagaatcagggtggtatggccatgcatgcat

SEQ ID NO: 1135 - DNA, 239 bp, Artificial Sequence
  source: /note="Description of Artificial Sequence: Synthetic polynucleotide"
atgaattcgcaaatcagggctctgaggccacatatgagagtggatttgtcattgacaagtttcccatcagccgcccaaacctaacattctactgtgagcaacatgagccctgaagacagcagcatatatctctgcagcgttagcaatccgtcgacatcagccccagcattttggtgatgggactcgactctccatcctaggtaagttgcagaatcagggtggtatggccatgcatgcat

SEQ ID NO: 1136 - DNA, 239 bp, Artificial Sequence
  source: /note="Description of Artificial Sequence: Synthetic polynucleotide"
atgaattcctcttctactccgttggtattggccagatcagctctgaggtgccccagaatctctcagcctccagaccccaggaccggcagtagttctaagaagctccttctcagtgactctggcttctatctctgtgcctggcgaactacgtcgacatcagccccagcattttggtgatgggactcgactctccatcctaggtaagttgcagaatcagggtggtatggccatgcatgcat

SEQ ID NO: 1137 - DNA, 239 bp, Artificial Sequence
  source: /note="Description of Artificial Sequence: Synthetic polynucleotide"
atgaattcttttataataatgaaatctcagagaagtctgaaatattcgatgatcaattctcagttgaaaggcctgatggatcaaatttcaatccggtccacaaagctggaggactcagccatgtacttctgtgccagcagtcaaggtcagtcgacataattcacccctccactttgggaacgggaccaggctcactgtgacaggtatgggggctccactcttgactcgggggcatgcat

SEQ ID NO: 1138 - DNA, 239 bp, Artificial Sequence
  source: /note="Description of Artificial Sequence: Synthetic polynucleotide"
atgaattcagctacaataataaggagctcattataaatgaaacagttccaaatcgcttctcacctaaatctccagacaaagctcacttaaatcaattccctggagcttggtgactctgctgtgtatttctgtgccagcagctacgtacggtcgacataattcacccctccactttgggaacgggaccaggctcactgtgacaggtatgggggctccactcttgactcgggggcatgcat

SEQ ID NO: 1139 - DNA, 239 bp, Artificial Sequence
  source: /note="Description of Artificial Sequence: Synthetic polynucleotide"
atgaattcgtctacagctatgagaaactctctataaatgaaagtgtgccaagtcgcttctcacctgaatgccccaacagctctctcttaactacacgccctgcagccagaagactcagccctgtatctctgcgccagcagctacgcgttgtcgacataattcacccctccactttgggaacgggaccaggctcactgtgacaggtatgggggctccactcttgactcgggggcatgcat

SEQ ID NO: 1140 - DNA, 239 bp, Artificial Sequence
  source: /note="Description of Artificial Sequence: Synthetic polynucleotide"
atgaattcgtctacaactttaaagaacagactgaaaacaacagtgtgccaagtcgcttctcacctgaatgccccaacagctctcacttatctacacaccctgcagccagaagactcggccctgtatctctgcgccagcagcctcagtgagtcgacataattcacccctccactttgggaacgggaccaggctcactgtgacaggtatgggggctccactcttgactcgggggcatgcat

SEQ ID NO: 1141 - DNA, 239 bp, Artificial Sequence
  source: /note="Description of Artificial Sequence: Synthetic polynucleotide"
atgaattcgtctacagtcttgaagaacgggttgaaaacaacagtgtgccaagtcgcttctcacctgaatgccccaacagctctcacttatctacacaccctgcagccagaagactcggccctgtatctctgcgccagcagcgtgtctacgtcgacataattcacccctccactttgggaacgggaccaggctcactgtgacaggtatgggggctccactcttgactcgggggcatgcat

SEQ ID NO: 1142 - DNA, 239 bp, Artificial Sequence
  source: /note="Description of Artificial Sequence: Synthetic polynucleotide"
atgaattctgaatacttcagtgagacacagagaaacaaaggaaacttccctggtcgattctcagggcgccagttctctaactctcgctcttgtgagcaccttggagctgggggactcggccctttatctttgcgccagcagagtaccgagtcgacataattcacccctccactttgggaacgggaccaggctcactgtgacaggtatgggggctccactcttgactcgggggcatgcat

SEQ ID NO: 1143 - DNA, 239 bp, Artificial Sequence
  source: /note="Description of Artificial Sequence: Synthetic polynucleotide"
atgaattctgaatatgctaatgagttaaggagatcagaaggaaacttccctaatcgattctcagggcgccagttccatgactgttgctcttgtgagtgccttggagctgggggactcggccctgtatctctgtgccagaagttgcctcagtcgacataattcacccctccactttgggaacgggaccaggctcactgtgacaggtatgggggctccactcttgactcgggggcatgcat

SEQ ID NO: 1144 - DNA, 239 bp, Artificial Sequence
  source: /note="Description of Artificial Sequence: Synthetic polynucleotide"
atgaattctcagtattatagggaggaagagaatggcagaggaaacttccctcctagattctcaggtctccagttccctaattatagctcttgtgaacgccttggagctggacgactcggccctgtatctctgtgccagcagtcgttagcgtcgacataattcacccctccactttgggaacgggaccaggctcactgtgacaggtatgggggctccactcttgactcgggggcatgcat

SEQ ID NO: 1145 - DNA, 239 bp, Artificial Sequence
  source: /note="Description of Artificial Sequence: Synthetic polynucleotide"
atgaattctcagtattatgagaaagaagagagaggaagaggaaacttccctgatcgattctcagctcgccagttccctaactatagctcttgtgaacgccttgttgctgggggactcggccctgtatctctgtgccagcagtggacatggtcgacataattcacccctccactttgggaacgggaccaggctcactgtgacaggtatgggggctccactcttgactcgggggcatgcat

SEQ ID NO: 1146 - DNA, 239 bp, Artificial Sequence
  source: /note="Description of Artificial Sequence: Synthetic polynucleotide"
atgaattctcagtattatgaggaggaagagagacagagaggcaacttccctgatcgattctcaggtcaccagttccctaactatagctcttgtgaacgccttgttgctgggggactcggccctctatctctgtgccagcagaggttgctgtcgacataattcacccctccactttgggaacgggaccaggctcactgtgacaggtatgggggctccactcttgactcgggggcatgcat

SEQ ID NO: 1147 - DNA, 239 bp, Artificial Sequence
  source: /note="Description of Artificial Sequence: Synthetic polynucleotide"
atgaattctcagtattatgagaaagaagagagaggaagaggaaacttccctgatcaattctcaggtcaccagttccctaactatagctcttgtgaacgccttgttgctaggggactcggccctctatctctgtgccagcaggtacagtggtcgacataattcacccctccactttgggaacgggaccaggctcactgtgacaggtatgggggctccactcttgactcgggggcatgcat

SEQ ID NO: 1148 - DNA, 239 bp, Artificial Sequence
  source: /note="Description of Artificial Sequence: Synthetic polynucleotide"
atgaattcttggtatgacgagggtgaagagagaaacagaggaaacttccctcctagattttcaggtcgccagttccctaattatagctcttgtgaacgccttggagctggaggactcggccctgtatctctgtgccagcagatccatgggtcgacataattcacccctccactttgggaacgggaccaggctcactgtgacaggtatgggggctccactcttgactcgggggcatgcat

SEQ ID NO: 1149 - DNA, 239 bp, Artificial Sequence
  source: /note="Description of Artificial Sequence: Synthetic polynucleotide"
atgaattctactcagcttctgagggtaccactgacaaaggagaagtccccaatggctacaatgtctccagattaaacaaacgggagttctctggagtcggctgctccctcccagacatctgtgtacttctgtgccagcagttgatgcgagtcgacataattcacccctccactttgggaacgggaccaggctcactgtgacaggtatgggggctccactcttgactcgggggcatgcat

SEQ ID NO: 1150 - DNA, 239 bp, Artificial Sequence
  source: /note="Description of Artificial Sequence: Synthetic polynucleotide"
atgaattctactcagttggtgagggtacaactgccaaaggagaggtccctgatggctacaatgtctccagattaaaaaaacagaatttccttggagtcggctgctccctcccaaacatctgtgtacttctgtgccagcagtgtagcagtgtcgacataattcacccctccactttgggaacgggaccaggctcactgtgacaggtatgggggctccactcttgactcgggggcatgcat

SEQ ID NO: 1151 - DNA, 239 bp, Artificial Sequence
  source: /note="Description of Artificial Sequence: Synthetic polynucleotide"
atgaattctactcagttggtgagggtacaactgccaaaggagaggtccctgatggctacaatgtctccagattaaaaaaacagaatttccttggagtcggctgctccctcccaaacatctgtgtacttctgtgccagcagtggatcatcgtcgacataattcacccctccactttgggaacgggaccaggctcactgtgacaggtatgggggctccactcttgactcgggggcatgcat

SEQ ID NO: 1152 - DNA, 239 bp, Artificial Sequence
  source: /note="Description of Artificial Sequence: Synthetic polynucleotide"
atgaattctattcaaatactgcaggtaccactggcaaaggagaagtccctgatggttatagtgtctccagagcaaacacagatgatttccttggcgtctgctgtaccctctcagacatctgtgtacttctgtgccagcagtgtgaacgtgtcgacataattcacccctccactttgggaacgggaccaggctcactgtgacaggtatgggggctccactcttgactcgggggcatgcat

SEQ ID NO: 1153 - DNA, 239 bp, Artificial Sequence
  source: /note="Description of Artificial Sequence: Synthetic polynucleotide"
atgaattctactcagttggtgctggtatcactgaccaaggagaagtccccaatggctacaatgtctccagatcaaccacagaggatttccctgctgtcggctgctccctcccagacatctgtgtacttctgtgccagcagttgtcatcggtcgacataattcacccctccactttgggaacgggaccaggctcactgtgacaggtatgggggctccactcttgactcgggggcatgcat

SEQ ID NO: 1154 - DNA, 239 bp, Artificial Sequence
  source: /note="Description of Artificial Sequence: Synthetic polynucleotide"
atgaattctattcagttggtgctggtatcactgacaaaggagaagtcccgaatggctacaacgtctccagatcaaccacagaggatttccctggagttggctgctccctcccagacatctgtgtacttctgtgccagcagtaggcttgagtcgacataattcacccctccactttgggaacgggaccaggctcactgtgacaggtatgggggctccactcttgactcgggggcatgcat

SEQ ID NO: 1155 - DNA, 239 bp, Artificial Sequence
  source: /note="Description of Artificial Sequence: Synthetic polynucleotide"
atgaattctactcagttgctgctgctctcactgacaaaggagaagttcccaatggctacaatgtctccagatcaaacacagaggatttccctggagtcagctgctccctctcagacttctgtttacttctgtgccagcagtacacacgtgtcgacataattcacccctccactttgggaacgggaccaggctcactgtgacaggtatgggggctccactcttgactcgggggcatgcat

SEQ ID NO: 1156 - DNA, 239 bp, Artificial Sequence
  source: /note="Description of Artificial Sequence: Synthetic polynucleotide"
atgaattctactactcagctgctgctggtactactgacaaagaagtccccaatggctacaatgtctctagattaaacacagaggatttccctggtgtcggctgctccctcccagacatctgtgtacttgtgtgccagcagttccacagtgtcgacataattcacccctccactttgggaacgggaccaggctcactgtgacaggtatgggggctccactcttgactcgggggcatgcat

SEQ ID NO: 1157 - DNA, 239 bp, Artificial Sequence
  source: /note="Description of Artificial Sequence: Synthetic polynucleotide"
atgaattctactcagttgctgctggtatcactgacaaaggagaagtccccgatggctacaatgtatccagatcaaacacagaggatttccctggagtcagctgctccctcccagacatctgtatacttctgtgccagcagtcagtctgtgtcgacataattcacccctccactttgggaacgggaccaggctcactgtgacaggtatgggggctccactcttgactcgggggcatgcat

SEQ ID NO: 1158 - DNA, 239 bp, Artificial Sequence
  source: /note="Description of Artificial Sequence: Synthetic polynucleotide"
atgaattcttccaaggcaaggatgcagcagacaaatcggggcttccccgtgatcggttctctgcacagaggtctgagggatccatctccattccagcgcacacagcagggggacttggctgtgtatctctgtgccagcagctccatgtggtcgacataattcacccctccactttgggaacgggaccaggctcactgtgacaggtatgggggctccactcttgactcgggggcatgcat

SEQ ID NO: 1159 - DNA, 239 bp, Artificial Sequence
  source: /note="Description of Artificial Sequence: Synthetic polynucleotide"
atgaattcttccaaggcaacagtgcaccagacaaatcagggctgcccagtgatcgcttctctgcagagaggactgggggatccgtctccaatccagcgcacacagcaggaggactcggccgtgtatctctgtgccagcagctcactgcagtcgacataattcacccctccactttgggaacgggaccaggctcactgtgacaggtatgggggctccactcttgactcgggggcatgcat

SEQ ID NO: 1160 - DNA, 239 bp, Artificial Sequence
  source: /note="Description of Artificial Sequence: Synthetic polynucleotide"
atgaattcttccaaggcacgggtgcggcagatgactcagggctgcccaacgatcggttctttgcagtcaggcctgagggatccgtctctaatccagcgcacagagcggggggactcagccgtgtatctctgtgccagcagccaagtcacgtcgacataattcacccctccactttgggaacgggaccaggctcactgtgacaggtatgggggctccactcttgactcgggggcatgcat

SEQ ID NO: 1161 - DNA, 239 bp, Artificial Sequence
  source: /note="Description of Artificial Sequence: Synthetic polynucleotide"
atgaattctcccagagtgatgctcaacgagacaaatcagggcggcccagtggtcggttctctgcagagaggcctgagagatccgtctccaatccagcgcacagagcagggggactcagctgtgtatctctgtgccagcagctagacggagtcgacataattcacccctccactttgggaacgggaccaggctcactgtgacaggtatgggggctccactcttgactcgggggcatgcat

SEQ ID NO: 1162 - DNA, 239 bp, Artificial Sequence
  source: /note="Description of Artificial Sequence: Synthetic polynucleotide"
atgaattcttcaattatgaagcccaacaagacaaatcagggctgcccaatgatcggttctctgcagagaggcctgagggatccatctccaatccagcgcacagagcagcgggactcggccatgtatcgctgtgccagcagcgagcgatagtcgacataattcacccctccactttgggaacgggaccaggctcactgtgacaggtatgggggctccactcttgactcgggggcatgcat

SEQ ID NO: 1163 - DNA, 239 bp, Artificial Sequence
  source: /note="Description of Artificial Sequence: Synthetic polynucleotide"
atgaattcttcaattatgaagctcaaccagacaaatcagggctgcccagtgatcggttctctgcagagaggcctgagggatccatctccaattcagcgcacagagcagcgggactcagccatgtatcgctgtgccagcagcctcgagaagtcgacataattcacccctccactttgggaacgggaccaggctcactgtgacaggtatgggggctccactcttgactcgggggcatgcat

SEQ ID NO: 1164 - DNA, 239 bp, Artificial Sequence
  source: /note="Description of Artificial Sequence: Synthetic polynucleotide"
atgaattcttccagaatgaagctcaactagacaaatcggggctgcccagtgatcgcttctttgcagaaaggcctgagggatccgtctccaatccagcgcacacagcaggaggactccgccgtgtatctctgtgccagcagcatgacaccgtcgacataattcacccctccactttgggaacgggaccaggctcactgtgacaggtatgggggctccactcttgactcgggggcatgcat

SEQ ID NO: 1165 - DNA, 239 bp, Artificial Sequence
  source: /note="Description of Artificial Sequence: Synthetic polynucleotide"
atgaattcttccagaatgaagctcaactagaaaaatcaaggctgctcagtgatcggttctctgcagagaggcctaagggatctttctccaatccagcgcacagagcagggggactcggccatgtatctctgtgccagcagccttcacgagtcgacataattcacccctccactttgggaacgggaccaggctcactgtgacaggtatgggggctccactcttgactcgggggcatgcat

SEQ ID NO: 1166 - DNA, 239 bp, Artificial Sequence
  source: /note="Description of Artificial Sequence: Synthetic polynucleotide"
atgaattctcagtattataatggagaagagagagcaaaaggaaacattcttgaacgattctccgcacaacagttccctgacttgcactctcctgagctctctggagctgggggactcagctttgtatttctgtgccagcagcgtagagtgtcgacataattcacccctccactttgggaacgggaccaggctcactgtgacaggtatgggggctccactcttgactcgggggcatgcat

SEQ ID NO: 1167 - DNA, 239 bp, Artificial Sequence
  source: /note="Description of Artificial Sequence: Synthetic polynucleotide"
atgaattctactcatatggtgttcacgacactaacaaaggagaagtctcagatggctacagtgtctctagatcaaacacagaggacctccctggagtctgctgcctcctcccagacatctgtatatttctgcgccagcagttcgtcgatgtcgacataattcacccctccactttgggaacgggaccaggctcactgtgacaggtatgggggctccactcttgactcgggggcatgcat

SEQ ID NO: 1168 - DNA, 239 bp, Artificial Sequence
  source: /note="Description of Artificial Sequence: Synthetic polynucleotide"
atgaattctactcagcagctgctgatattacagataaaggagaagtccccgatggctatgttgtctccagatccaagacagagaatttccctggagtcagctacccgctcccagacatctgtgtatttctgcgccagcagtagctagtggtcgacataattcacccctccactttgggaacgggaccaggctcactgtgacaggtatgggggctccactcttgactcgggggcatgcat

SEQ ID NO: 1169 - DNA, 239 bp, Artificial Sequence
  source: /note="Description of Artificial Sequence: Synthetic polynucleotide"
atgaattctactcatatggtgttaaagatactgacaaaggagaagtctcagatggctatagtgtctctagatcaaagacagaggatttccctggagtccgctaccagctcccagacatctgtgtacttctgtgccatcagttgagacctgtcgacataattcacccctccactttgggaacgggaccaggctcactgtgacaggtatgggggctccactcttgactcgggggcatgcat

SEQ ID NO: 1170 - DNA, 239 bp, Artificial Sequence
  source: /note="Description of Artificial Sequence: Synthetic polynucleotide"
atgaattctttcaggatgagagtgtagtagatgattcacagttgcctaaggatcgattttctgcagagaggctcaaaggagtagactccaatccagcctgcagagcttggggactcggccatgtatctctgtgccagcagcgatggcttgtcgacataattcacccctccactttgggaacgggaccaggctcactgtgacaggtatgggggctccactcttgactcgggggcatgcat

SEQ ID NO: 1171 - DNA, 239 bp, Artificial Sequence
  source: /note="Description of Artificial Sequence: Synthetic polynucleotide"
atgaattctttcagaataacggtgtagtggatgattcacagttgcctaaggatcgattttctgcagagaggctcaaaggagtagactccaatccagcctgcaaagcttgaggactcggccgtgtatctctgtgccagcagcgcatctgagtcgacataattcacccctccactttgggaacgggaccaggctcactgtgacaggtatgggggctccactcttgactcgggggcatgcat

SEQ ID NO: 1172 - DNA, 239 bp, Artificial Sequence
  source: /note="Description of Artificial Sequence: Synthetic polynucleotide"
atgaattctatgagaatgaggaagcagtagacgattcacagttgcctaaggatcgattttctgcagagaggctcaaaggagtagactccaatccagcctgcagagcttggggactcggccgtgtatctctgtgccagcagcgacactctgtcgacataattcacccctccactttgggaacgggaccaggctcactgtgacaggtatgggggctccactcttgactcgggggcatgcat

SEQ ID NO: 1173 - DNA, 239 bp, Artificial Sequence
  source: /note="Description of Artificial Sequence: Synthetic polynucleotide"
atgaattctttaacaacaacgttccgatagatgattcagggatgcccgaggatcgattctcagctaagatgcctaatgcatcattctccaatccagccctcagaacccagggactcagctgtgtacttctgtgccagcagttgctacacgtcgacataattcacccctccactttgggaacgggaccaggctcactgtgacaggtatgggggctccactcttgactcgggggcatgcat

SEQ ID NO: 1174 - DNA, 239 bp, Artificial Sequence
  source: /note="Description of Artificial Sequence: Synthetic polynucleotide"
atgaattctttaacaacaacgttccgatagatgattcagggatgcccgaggatcgattctcagctaagatgcctaatgcatcattctccaatccagccctcagaacccagggactcagctgtgtacttctgtgccagcagttcagcttggtcgacataattcacccctccactttgggaacgggaccaggctcactgtgacaggtatgggggctccactcttgactcgggggcatgcat

SEQ ID NO: 1175 - DNA, 239 bp, Artificial Sequence
  source: /note="Description of Artificial Sequence: Synthetic polynucleotide"
atgaattcttccgcaaccgggctcctctagatgattcggggatgccgaaggatcgattctcagcagagatgcctgatgcaactttagccaatccagccctcagaacccagggactcagctgtgtatttttgtgctagtggtttcggaacgtcgacataattcacccctccactttgggaacgggaccaggctcactgtgacaggtatgggggctccactcttgactcgggggcatgcat

SEQ ID NO: 1176 - DNA, 239 bp, Artificial Sequence
  source: /note="Description of Artificial Sequence: Synthetic polynucleotide"
atgaattctcgttttatgaaaagatgcagagcgataaaggaagcatccctgatcgattctcagctcaacagttcagtgactatcattctgatgagctccttggagctgggggactcagccctgtacttctgtgccagcagcgcaattcggtcgacataattcacccctccactttgggaacgggaccaggctcactgtgacaggtatgggggctccactcttgactcgggggcatgcat

SEQ ID NO: 1177 - DNA, 239 bp, Artificial Sequence
  source: /note="Description of Artificial Sequence: Synthetic polynucleotide"
atgaattctttgtgaaagagtctaaacaggatgagtccggtatgcccaacaatcgattcttagctgaaaggactggagggacgtattctagtgcagcctgcagaactggaggattctggagtttatttctgtgccagcagccaagaggtgtcgacataattcacccctccactttgggaacgggaccaggctcactgtgacaggtatgggggctccactcttgactcgggggcatgcat

SEQ ID NO: 1178 - DNA, 239 bp, Artificial Sequence
  source: /note="Description of Artificial Sequence: Synthetic polynucleotide"
atgaattccactactatgacaaagattttaacaatgaagcagacacccctgataacttccaatccaggaggccgaacacttctttctgctatccgctcaccaggcctgggggacgcagccatgtacctgtgtgccaccagcgaatggacgtcgacataattcacccctccactttgggaacgggaccaggctcactgtgacaggtatgggggctccactcttgactcgggggcatgcat

SEQ ID NO: 1179 - DNA, 239 bp, Artificial Sequence
  source: /note="Description of Artificial Sequence: Synthetic polynucleotide"
atgaattcttccagaatgaaaatgtctttgatgaaacaggtatgcccaaggaaagattttcagctaagtgcctcccaaattcaccctgtaatccaggctacgaagcttgaggattcagcagtgtatttttgtgccagcagcaactgccagtcgacataattcacccctccactttgggaacgggaccaggctcactgtgacaggtatgggggctccactcttgactcgggggcatgcat

SEQ ID NO: 1180 - DNA, 239 bp, Artificial Sequence
  source: /note="Description of Artificial Sequence: Synthetic polynucleotide"
atgaattctccttccagtaccaaaacattgcagttgattcagggatgcccaaggaacgattcacagctgaaagacctaacggaacgtcttaagatccatcccgcagagccgagggactcagccgtgtatctctacagtagccctagtaggtcgacataattcacccctccactttgggaacgggaccaggctcactgtgacaggtatgggggctccactcttgactcgggggcatgcat

SEQ ID NO: 1181 - DNA, 239 bp, Artificial Sequence
  source: /note="Description of Artificial Sequence: Synthetic polynucleotide"
atgaattcctccagaaagaaaatatcatagatgagtcaggaatgccaaaggaacgattttctgctgaatttcccaaagagggccccagcaatccagcaggtagtgcgaggagattcggcagcttatttctgtgccagctcactgacgttgtcgacataattcacccctccactttgggaacgggaccaggctcactgtgacaggtatgggggctccactcttgactcgggggcatgcat

SEQ ID NO: 1182 - DNA, 239 bp, Artificial Sequence
  source: /note="Description of Artificial Sequence: Synthetic polynucleotide"
atgaattctactcacagatagtaaatgactttcagaaaggagatatagctgaagggtacagcgtctctcgggagaagaaggaatcctttcgtgacatcggcccaaaagaacccgacagctttctatctctgtgccagtagttgcagacagtcgacataattcacccctccactttgggaacgggaccaggctcactgtgacaggtatgggggctccactcttgactcgggggcatgcat

SEQ ID NO: 1183 - DNA, 239 bp, Artificial Sequence
  source: /note="Description of Artificial Sequence: Synthetic polynucleotide"
atgaattctccaatgagggctccaaggccacatacgagcaaggcgtcgagaaggacaagtttctcatcaaccatgcaagcctgaccttgtacagtgaccagtgcccatcctgaagacagcagcttctacatctgcagtgctagttgaccgtcgacataattcacccctccactttgggaacgggaccaggctcactgtgacaggtatgggggctccactcttgactcgggggcatgcat

SEQ ID NO: 1184 - DNA, 239 bp, Artificial Sequence
  source: /note="Description of Artificial Sequence: Synthetic polynucleotide"
atgaattcactcctttgatgtcaaagatataaacaaaggagagatctctgatggatacagtgtctctcgacaggcacaggctaaattctctagagtctgccatccccaaccagacagctctttacttctgtgccaccagtggtctcctagtcgacataattcacccctccactttgggaacgggaccaggctcactgtgacaggtatgggggctccactcttgactcgggggcatgcat

SEQ ID NO: 1185 - DNA, 239 bp, Artificial Sequence
  source: /note="Description of Artificial Sequence: Synthetic polynucleotide"
atgaattctattcctatggagttaattccacagagaagggagatctttcctctgagtcaacagtctccagaataaggacggagcattttcctggagtctgccaggccctcacatacctctcagtacctctgtgccagcagtctgcaatcgtcgacataattcacccctccactttgggaacgggaccaggctcactgtgacaggtatgggggctccactcttgactcgggggcatgcat

SEQ ID NO: 1186 - DNA, 239 bp, Artificial Sequence
  source: /note="Description of Artificial Sequence: Synthetic polynucleotide"
atgaattctattcaatgaatgttgaggtgactgataagggagatgttcctgaagggtacaaagtctctcgaaaagagaagaggaatttccctggagtcgcccagccccaaccagacctctctgtacttctgtgccagcagttgagcgaagtcgacataattcacccctccactttgggaacgggaccaggctcactgtgacaggtatgggggctccactcttgactcgggggcatgcat

SEQ ID NO: 1187 - DNA, 239 bp, Artificial Sequence
  source: /note="Description of Artificial Sequence: Synthetic polynucleotide"
atgaattcttctcatatgatgttaaaatgaaagaaaaaggagatattcctgaggggtacagtgtctctagagagaagaaggagcgcttctctggagtccgccagcaccaaccagacatctatgtacctctgtgccagcagtttggactggtcgacataattcacccctccactttgggaacgggaccaggctcactgtgacaggtatgggggctccactcttgactcgggggcatgcat

SEQ ID NO: 1188 - DNA, 239 bp, Artificial Sequence
  source: /note="Description of Artificial Sequence: Synthetic polynucleotide"
atgaattcgcaaatcagggctctgaggccacatatgagagtggatttgtcattgacaagtttcccatcagccgcccaaacctaacattctactgtgagcaacatgagccctgaagacagcagcatatatctctgcagcgttagcaatccgtcgacataattcacccctccactttgggaacgggaccaggctcactgtgacaggtatgggggctccactcttgactcgggggcatgcat

SEQ ID NO: 1189 - DNA, 239 bp, Artificial Sequence
  source: /note="Description of Artificial Sequence: Synthetic polynucleotide"
atgaattcctcttctactccgttggtattggccagatcagctctgaggtgccccagaatctctcagcctccagaccccaggaccggcagtagttctaagaagctccttctcagtgactctggcttctatctctgtgcctggcgaactacgtcgacataattcacccctccactttgggaacgggaccaggctcactgtgacaggtatgggggctccactcttgactcgggggcatgcat

SEQ ID NO: 1190 - DNA, 239 bp, Artificial Sequence
  source: /note="Description of Artificial Sequence: Synthetic polynucleotide"
atgaattcttttataataatgaaatctcagagaagtctgaaatattcgatgatcaattctcagttgaaaggcctgatggatcaaatttcaatccggtccacaaagctggaggactcagccatgtacttctgtgccagcagtcaaggtcagtcgacacaatgagcagttcttcgggccagggacacggctcaccgtgctaggtaagaagggggctccaggtgggagagaggggcatgcat

SEQ ID NO: 1191 - DNA, 239 bp, Artificial Sequence
  source: /note="Description of Artificial Sequence: Synthetic polynucleotide"
atgaattcagctacaataataaggagctcattataaatgaaacagttccaaatcgcttctcacctaaatctccagacaaagctcacttaaatcaattccctggagcttggtgactctgctgtgtatttctgtgccagcagctacgtacggtcgacacaatgagcagttcttcgggccagggacacggctcaccgtgctaggtaagaagggggctccaggtgggagagaggggcatgcat

SEQ ID NO: 1192 - DNA, 239 bp, Artificial Sequence
  source: /note="Description of Artificial Sequence: Synthetic polynucleotide"
atgaattcgtctacagctatgagaaactctctataaatgaaagtgtgccaagtcgcttctcacctgaatgccccaacagctctctcttaactacacgccctgcagccagaagactcagccctgtatctctgcgccagcagctacgcgttgtcgacacaatgagcagttcttcgggccagggacacggctcaccgtgctaggtaagaagggggctccaggtgggagagaggggcatgcat

SEQ ID NO: 1193 - DNA, 239 bp, Artificial Sequence
  source: /note="Description of Artificial Sequence: Synthetic polynucleotide"
atgaattcgtctacaactttaaagaacagactgaaaacaacagtgtgccaagtcgcttctcacctgaatgccccaacagctctcacttatctacacaccctgcagccagaagactcggccctgtatctctgcgccagcagcctcagtgagtcgacacaatgagcagttcttcgggccagggacacggctcaccgtgctaggtaagaagggggctccaggtgggagagaggggcatgcat

SEQ ID NO: 1194 - DNA, 239 bp, Artificial Sequence
  source: /note="Description of Artificial Sequence: Synthetic polynucleotide"
atgaattcgtctacagtcttgaagaacgggttgaaaacaacagtgtgccaagtcgcttctcacctgaatgccccaacagctctcacttatctacacaccctgcagccagaagactcggccctgtatctctgcgccagcagcgtgtctacgtcgacacaatgagcagttcttcgggccagggacacggctcaccgtgctaggtaagaagggggctccaggtgggagagaggggcatgcat

SEQ ID NO: 1195 - DNA, 239 bp, Artificial Sequence
  source: /note="Description of Artificial Sequence: Synthetic polynucleotide"
atgaattctgaatacttcagtgagacacagagaaacaaaggaaacttccctggtcgattctcagggcgccagttctctaactctcgctcttgtgagcaccttggagctgggggactcggccctttatctttgcgccagcagagtaccgagtcgacacaatgagcagttcttcgggccagggacacggctcaccgtgctaggtaagaagggggctccaggtgggagagaggggcatgcat

SEQ ID NO: 1196 - DNA, 239 bp, Artificial Sequence
  source: /note="Description of Artificial Sequence: Synthetic polynucleotide"
atgaattctgaatatgctaatgagttaaggagatcagaaggaaacttccctaatcgattctcagggcgccagttccatgactgttgctcttgtgagtgccttggagctgggggactcggccctgtatctctgtgccagaagttgcctcagtcgacacaatgagcagttcttcgggccagggacacggctcaccgtgctaggtaagaagggggctccaggtgggagagaggggcatgcat

SEQ ID NO: 1197 - DNA, 239 bp, Artificial Sequence
  source: /note="Description of Artificial Sequence: Synthetic polynucleotide"
atgaattctcagtattatagggaggaagagaatggcagaggaaacttccctcctagattctcaggtctccagttccctaattatagctcttgtgaacgccttggagctggacgactcggccctgtatctctgtgccagcagtcgttagcgtcgacacaatgagcagttcttcgggccagggacacggctcaccgtgctaggtaagaagggggctccaggtgggagagaggggcatgcat

SEQ ID NO: 1198 - DNA, 239 bp, Artificial Sequence
  source: /note="Description of Artificial Sequence: Synthetic polynucleotide"
atgaattctcagtattatgagaaagaagagagaggaagaggaaacttccctgatcgattctcagctcgccagttccctaactatagctcttgtgaacgccttgttgctgggggactcggccctgtatctctgtgccagcagtggacatggtcgacacaatgagcagttcttcgggccagggacacggctcaccgtgctaggtaagaagggggctccaggtgggagagaggggcatgcat

SEQ ID NO: 1199 - DNA, 239 bp, Artificial Sequence
  source: /note="Description of Artificial Sequence: Synthetic polynucleotide"
atgaattctcagtattatgaggaggaagagagacagagaggcaacttccctgatcgattctcaggtcaccagttccctaactatagctcttgtgaacgccttgttgctgggggactcggccctctatctctgtgccagcagaggttgctgtcgacacaatgagcagttcttcgggccagggacacggctcaccgtgctaggtaagaagggggctccaggtgggagagaggggcatgcat

SEQ ID NO: 1200 - DNA, 239 bp, Artificial Sequence
  source: /note="Description of Artificial Sequence: Synthetic polynucleotide"
atgaattctcagtattatgagaaagaagagagaggaagaggaaacttccctgatcaattctcaggtcaccagttccctaactatagctcttgtgaacgccttgttgctaggggactcggccctctatctctgtgccagcaggtacagtggtcgacacaatgagcagttcttcgggccagggacacggctcaccgtgctaggtaagaagggggctccaggtgggagagaggggcatgcat

SEQ ID NO: 1201 - DNA, 239 bp, Artificial Sequence
  source: /note="Description of Artificial Sequence: Synthetic polynucleotide"
atgaattcttggtatgacgagggtgaagagagaaacagaggaaacttccctcctagattttcaggtcgccagttccctaattatagctcttgtgaacgccttggagctggaggactcggccctgtatctctgtgccagcagatccatgggtcgacacaatgagcagttcttcgggccagggacacggctcaccgtgctaggtaagaagggggctccaggtgggagagaggggcatgcat

SEQ ID NO: 1202 - DNA, 239 bp, Artificial Sequence
  source: /note="Description of Artificial Sequence: Synthetic polynucleotide"
atgaattctactcagcttctgagggtaccactgacaaaggagaagtccccaatggctacaatgtctccagattaaacaaacgggagttctctggagtcggctgctccctcccagacatctgtgtacttctgtgccagcagttgatgcgagtcgacacaatgagcagttcttcgggccagggacacggctcaccgtgctaggtaagaagggggctccaggtgggagagaggggcatgcat

SEQ ID NO: 1203 - DNA, 239 bp, Artificial Sequence
  source: /note="Description of Artificial Sequence: Synthetic polynucleotide"
atgaattctactcagttggtgagggtacaactgccaaaggagaggtccctgatggctacaatgtctccagattaaaaaaacagaatttccttggagtcggctgctccctcccaaacatctgtgtacttctgtgccagcagtgtagcagtgtcgacacaatgagcagttcttcgggccagggacacggctcaccgtgctaggtaagaagggggctccaggtgggagagaggggcatgcat

SEQ ID NO: 1204 - DNA, 239 bp, Artificial Sequence
  source: /note="Description of Artificial Sequence: Synthetic polynucleotide"
atgaattctactcagttggtgagggtacaactgccaaaggagaggtccctgatggctacaatgtctccagattaaaaaaacagaatttccttggagtcggctgctccctcccaaacatctgtgtacttctgtgccagcagtggatcatcgtcgacacaatgagcagttcttcgggccagggacacggctcaccgtgctaggtaagaagggggctccaggtgggagagaggggcatgcat

SEQ ID NO: 1205 - DNA, 239 bp, Artificial Sequence
  source: /note="Description of Artificial Sequence: Synthetic polynucleotide"
atgaattctattcaaatactgcaggtaccactggcaaaggagaagtccctgatggttatagtgtctccagagcaaacacagatgatttccttggcgtctgctgtaccctctcagacatctgtgtacttctgtgccagcagtgtgaacgtgtcgacacaatgagcagttcttcgggccagggacacggctcaccgtgctaggtaagaagggggctccaggtgggagagaggggcatgcat

SEQ ID NO: 1206 - DNA, 239 bp, Artificial Sequence
  source: /note="Description of Artificial Sequence: Synthetic polynucleotide"
atgaattctactcagttggtgctggtatcactgaccaaggagaagtccccaatggctacaatgtctccagatcaaccacagaggatttccctgctgtcggctgctccctcccagacatctgtgtacttctgtgccagcagttgtcatcggtcgacacaatgagcagttcttcgggccagggacacggctcaccgtgctaggtaagaagggggctccaggtgggagagaggggcatgcat

SEQ ID NO: 1207 - DNA, 239 bp, Artificial Sequence
  source: /note="Description of Artificial Sequence: Synthetic polynucleotide"
atgaattctattcagttggtgctggtatcactgacaaaggagaagtcccgaatggctacaacgtctccagatcaaccacagaggatttccctggagttggctgctccctcccagacatctgtgtacttctgtgccagcagtaggcttgagtcgacacaatgagcagttcttcgggccagggacacggctcaccgtgctaggtaagaagggggctccaggtgggagagaggggcatgcat

SEQ ID NO: 1208 - DNA, 239 bp, Artificial Sequence
  source: /note="Description of Artificial Sequence: Synthetic polynucleotide"
atgaattctactcagttgctgctgctctcactgacaaaggagaagttcccaatggctacaatgtctccagatcaaacacagaggatttccctggagtcagctgctccctctcagacttctgtttacttctgtgccagcagtacacacgtgtcgacacaatgagcagttcttcgggccagggacacggctcaccgtgctaggtaagaagggggctccaggtgggagagaggggcatgcat

SEQ ID NO: 1209 - DNA, 239 bp, Artificial Sequence
  source: /note="Description of Artificial Sequence: Synthetic polynucleotide"
atgaattctactactcagctgctgctggtactactgacaaagaagtccccaatggctacaatgtctctagattaaacacagaggatttccctggtgtcggctgctccctcccagacatctgtgtacttgtgtgccagcagttccacagtgtcgacacaatgagcagttcttcgggccagggacacggctcaccgtgctaggtaagaagggggctccaggtgggagagaggggcatgcat

SEQ ID NO: 1210 - DNA, 239 bp, Artificial Sequence
  source: /note="Description of Artificial Sequence: Synthetic polynucleotide"
atgaattctactcagttgctgctggtatcactgacaaaggagaagtccccgatggctacaatgtatccagatcaaacacagaggatttccctggagtcagctgctccctcccagacatctgtatacttctgtgccagcagtcagtctgtgtcgacacaatgagcagttcttcgggccagggacacggctcaccgtgctaggtaagaagggggctccaggtgggagagaggggcatgcat

SEQ ID NO: 1211 - DNA, 239 bp, Artificial Sequence
  source: /note="Description of Artificial Sequence: Synthetic polynucleotide"
atgaattcttccaaggcaaggatgcagcagacaaatcggggcttccccgtgatcggttctctgcacagaggtctgagggatccatctccattccagcgcacacagcagggggacttggctgtgtatctctgtgccagcagctccatgtggtcgacacaatgagcagttcttcgggccagggacacggctcaccgtgctaggtaagaagggggctccaggtgggagagaggggcatgcat

SEQ ID NO: 1212 - DNA, 239 bp, Artificial Sequence
  source: /note="Description of Artificial Sequence: Synthetic polynucleotide"
atgaattcttccaaggcaacagtgcaccagacaaatcagggctgcccagtgatcgcttctctgcagagaggactgggggatccgtctccaatccagcgcacacagcaggaggactcggccgtgtatctctgtgccagcagctcactgcagtcgacacaatgagcagttcttcgggccagggacacggctcaccgtgctaggtaagaagggggctccaggtgggagagaggggcatgcat

SEQ ID NO: 1213 - DNA, 239 bp, Artificial Sequence
  source: /note="Description of Artificial Sequence: Synthetic polynucleotide"
atgaattcttccaaggcacgggtgcggcagatgactcagggctgcccaacgatcggttctttgcagtcaggcctgagggatccgtctctaatccagcgcacagagcggggggactcagccgtgtatctctgtgccagcagccaagtcacgtcgacacaatgagcagttcttcgggccagggacacggctcaccgtgctaggtaagaagggggctccaggtgggagagaggggcatgcat

SEQ ID NO: 1214 - DNA, 239 bp, Artificial Sequence
  source: /note="Description of Artificial Sequence: Synthetic polynucleotide"
atgaattctcccagagtgatgctcaacgagacaaatcagggcggcccagtggtcggttctctgcagagaggcctgagagatccgtctccaatccagcgcacagagcagggggactcagctgtgtatctctgtgccagcagctagacggagtcgacacaatgagcagttcttcgggccagggacacggctcaccgtgctaggtaagaagggggctccaggtgggagagaggggcatgcat

SEQ ID NO: 1215 - DNA, 239 bp, Artificial Sequence
  source: /note="Description of Artificial Sequence: Synthetic polynucleotide"
atgaattcttcaattatgaagcccaacaagacaaatcagggctgcccaatgatcggttctctgcagagaggcctgagggatccatctccaatccagcgcacagagcagcgggactcggccatgtatcgctgtgccagcagcgagcgatagtcgacacaatgagcagttcttcgggccagggacacggctcaccgtgctaggtaagaagggggctccaggtgggagagaggggcatgcat

SEQ ID NO: 1216 - DNA, 239 bp, Artificial Sequence
  source: /note="Description of Artificial Sequence: Synthetic polynucleotide"
atgaattcttcaattatgaagctcaaccagacaaatcagggctgcccagtgatcggttctctgcagagaggcctgagggatccatctccaattcagcgcacagagcagcgggactcagccatgtatcgctgtgccagcagcctcgagaagtcgacacaatgagcagttcttcgggccagggacacggctcaccgtgctaggtaagaagggggctccaggtgggagagaggggcatgcat

SEQ ID NO: 1217 - DNA, 239 bp, Artificial Sequence
  source: /note="Description of Artificial Sequence: Synthetic polynucleotide"
atgaattcttccagaatgaagctcaactagacaaatcggggctgcccagtgatcgcttctttgcagaaaggcctgagggatccgtctccaatccagcgcacacagcaggaggactccgccgtgtatctctgtgccagcagcatgacaccgtcgacacaatgagcagttcttcgggccagggacacggctcaccgtgctaggtaagaagggggctccaggtgggagagaggggcatgcat

SEQ ID NO: 1218 - DNA, 239 bp, Artificial Sequence
  source: /note="Description of Artificial Sequence: Synthetic polynucleotide"
atgaattcttccagaatgaagctcaactagaaaaatcaaggctgctcagtgatcggttctctgcagagaggcctaagggatctttctccaatccagcgcacagagcagggggactcggccatgtatctctgtgccagcagccttcacgagtcgacacaatgagcagttcttcgggccagggacacggctcaccgtgctaggtaagaagggggctccaggtgggagagaggggcatgcat

SEQ ID NO: 1219 - DNA, 239 bp, Artificial Sequence
  source: /note="Description of Artificial Sequence: Synthetic polynucleotide"
atgaattctcagtattataatggagaagagagagcaaaaggaaacattcttgaacgattctccgcacaacagttccctgacttgcactctcctgagctctctggagctgggggactcagctttgtatttctgtgccagcagcgtagagtgtcgacacaatgagcagttcttcgggccagggacacggctcaccgtgctaggtaagaagggggctccaggtgggagagaggggcatgcat

SEQ ID NO: 1220 - DNA, 239 bp, Artificial Sequence
  source: /note="Description of Artificial Sequence: Synthetic polynucleotide"
atgaattctactcatatggtgttcacgacactaacaaaggagaagtctcagatggctacagtgtctctagatcaaacacagaggacctccctggagtctgctgcctcctcccagacatctgtatatttctgcgccagcagttcgtcgatgtcgacacaatgagcagttcttcgggccagggacacggctcaccgtgctaggtaagaagggggctccaggtgggagagaggggcatgcat

SEQ ID NO: 1221 - DNA, 239 bp, Artificial Sequence
  source: /note="Description of Artificial Sequence: Synthetic polynucleotide"
atgaattctactcagcagctgctgatattacagataaaggagaagtccccgatggctatgttgtctccagatccaagacagagaatttccctggagtcagctacccgctcccagacatctgtgtatttctgcgccagcagtagctagtggtcgacacaatgagcagttcttcgggccagggacacggctcaccgtgctaggtaagaagggggctccaggtgggagagaggggcatgcat

SEQ ID NO: 1222 - DNA, 239 bp, Artificial Sequence
  source: /note="Description of Artificial Sequence: Synthetic polynucleotide"
atgaattctactcatatggtgttaaagatactgacaaaggagaagtctcagatggctatagtgtctctagatcaaagacagaggatttccctggagtccgctaccagctcccagacatctgtgtacttctgtgccatcagttgagacctgtcgacacaatgagcagttcttcgggccagggacacggctcaccgtgctaggtaagaagggggctccaggtgggagagaggggcatgcat

SEQ ID NO: 1223 - DNA, 239 bp, Artificial Sequence
  source: /note="Description of Artificial Sequence: Synthetic polynucleotide"
atgaattctttcaggatgagagtgtagtagatgattcacagttgcctaaggatcgattttctgcagagaggctcaaaggagtagactccaatccagcctgcagagcttggggactcggccatgtatctctgtgccagcagcgatggcttgtcgacacaatgagcagttcttcgggccagggacacggctcaccgtgctaggtaagaagggggctccaggtgggagagaggggcatgcat

SEQ ID NO: 1224 - DNA, 239 bp, Artificial Sequence
  source: /note="Description of Artificial Sequence: Synthetic polynucleotide"
atgaattctttcagaataacggtgtagtggatgattcacagttgcctaaggatcgattttctgcagagaggctcaaaggagtagactccaatccagcctgcaaagcttgaggactcggccgtgtatctctgtgccagcagcgcatctgagtcgacacaatgagcagttcttcgggccagggacacggctcaccgtgctaggtaagaagggggctccaggtgggagagaggggcatgcat

SEQ ID NO: 1225 - DNA, 239 bp, Artificial Sequence
  source: /note="Description of Artificial Sequence: Synthetic polynucleotide"
atgaattctatgagaatgaggaagcagtagacgattcacagttgcctaaggatcgattttctgcagagaggctcaaaggagtagactccaatccagcctgcagagcttggggactcggccgtgtatctctgtgccagcagcgacactctgtcgacacaatgagcagttcttcgggccagggacacggctcaccgtgctaggtaagaagggggctccaggtgggagagaggggcatgcat

SEQ ID NO: 1226 - DNA, 239 bp, Artificial Sequence
  source: /note="Description of Artificial Sequence: Synthetic polynucleotide"
atgaattctttaacaacaacgttccgatagatgattcagggatgcccgaggatcgattctcagctaagatgcctaatgcatcattctccaatccagccctcagaacccagggactcagctgtgtacttctgtgccagcagttgctacacgtcgacacaatgagcagttcttcgggccagggacacggctcaccgtgctaggtaagaagggggctccaggtgggagagaggggcatgcat

SEQ ID NO: 1227 - DNA, 239 bp, Artificial Sequence
  source: /note="Description of Artificial Sequence: Synthetic polynucleotide"
atgaattctttaacaacaacgttccgatagatgattcagggatgcccgaggatcgattctcagctaagatgcctaatgcatcattctccaatccagccctcagaacccagggactcagctgtgtacttctgtgccagcagttcagcttggtcgacacaatgagcagttcttcgggccagggacacggctcaccgtgctaggtaagaagggggctccaggtgggagagaggggcatgcat

SEQ ID NO: 1228 - DNA, 239 bp, Artificial Sequence
  source: /note="Description of Artificial Sequence: Synthetic polynucleotide"
atgaattcttccgcaaccgggctcctctagatgattcggggatgccgaaggatcgattctcagcagagatgcctgatgcaactttagccaatccagccctcagaacccagggactcagctgtgtatttttgtgctagtggtttcggaacgtcgacacaatgagcagttcttcgggccagggacacggctcaccgtgctaggtaagaagggggctccaggtgggagagaggggcatgcat

SEQ ID NO: 1229 - DNA, 239 bp, Artificial Sequence
  source: /note="Description of Artificial Sequence: Synthetic polynucleotide"
atgaattctcgttttatgaaaagatgcagagcgataaaggaagcatccctgatcgattctcagctcaacagttcagtgactatcattctgatgagctccttggagctgggggactcagccctgtacttctgtgccagcagcgcaattcggtcgacacaatgagcagttcttcgggccagggacacggctcaccgtgctaggtaagaagggggctccaggtgggagagaggggcatgcat

SEQ ID NO: 1230 - DNA, 239 bp, Artificial Sequence
  source: /note="Description of Artificial Sequence: Synthetic polynucleotide"
atgaattctttgtgaaagagtctaaacaggatgagtccggtatgcccaacaatcgattcttagctgaaaggactggagggacgtattctagtgcagcctgcagaactggaggattctggagtttatttctgtgccagcagccaagaggtgtcgacacaatgagcagttcttcgggccagggacacggctcaccgtgctaggtaagaagggggctccaggtgggagagaggggcatgcat

SEQ ID NO: 1231 - DNA, 239 bp, Artificial Sequence
  source: /note="Description of Artificial Sequence: Synthetic polynucleotide"
atgaattccactactatgacaaagattttaacaatgaagcagacacccctgataacttccaatccaggaggccgaacacttctttctgctatccgctcaccaggcctgggggacgcagccatgtacctgtgtgccaccagcgaatggacgtcgacacaatgagcagttcttcgggccagggacacggctcaccgtgctaggtaagaagggggctccaggtgggagagaggggcatgcat

SEQ ID NO: 1232 - DNA, 239 bp, Artificial Sequence
  source: /note="Description of Artificial Sequence: Synthetic polynucleotide"
atgaattcttccagaatgaaaatgtctttgatgaaacaggtatgcccaaggaaagattttcagctaagtgcctcccaaattcaccctgtaatccaggctacgaagcttgaggattcagcagtgtatttttgtgccagcagcaactgccagtcgacacaatgagcagttcttcgggccagggacacggctcaccgtgctaggtaagaagggggctccaggtgggagagaggggcatgcat

SEQ ID NO: 1233 - DNA, 239 bp, Artificial Sequence
  source: /note="Description of Artificial Sequence: Synthetic polynucleotide"
atgaattctccttccagtaccaaaacattgcagttgattcagggatgcccaaggaacgattcacagctgaaagacctaacggaacgtcttaagatccatcccgcagagccgagggactcagccgtgtatctctacagtagccctagtaggtcgacacaatgagcagttcttcgggccagggacacggctcaccgtgctaggtaagaagggggctccaggtgggagagaggggcatgcat

SEQ ID NO: 1234 - DNA, 239 bp, Artificial Sequence
  source: /note="Description of Artificial Sequence: Synthetic polynucleotide"
atgaattcctccagaaagaaaatatcatagatgagtcaggaatgccaaaggaacgattttctgctgaatttcccaaagagggccccagcaatccagcaggtagtgcgaggagattcggcagcttatttctgtgccagctcactgacgttgtcgacacaatgagcagttcttcgggccagggacacggctcaccgtgctaggtaagaagggggctccaggtgggagagaggggcatgcat

SEQ ID NO: 1235 - DNA, 239 bp, Artificial Sequence
  source: /note="Description of Artificial Sequence: Synthetic polynucleotide"
atgaattctactcacagatagtaaatgactttcagaaaggagatatagctgaagggtacagcgtctctcgggagaagaaggaatcctttcgtgacatcggcccaaaagaacccgacagctttctatctctgtgccagtagttgcagacagtcgacacaatgagcagttcttcgggccagggacacggctcaccgtgctaggtaagaagggggctccaggtgggagagaggggcatgcat

SEQ ID NO: 1236 - DNA, 239 bp, Artificial Sequence
  source: /note="Description of Artificial Sequence: Synthetic polynucleotide"
atgaattctccaatgagggctccaaggccacatacgagcaaggcgtcgagaaggacaagtttctcatcaaccatgcaagcctgaccttgtacagtgaccagtgcccatcctgaagacagcagcttctacatctgcagtgctagttgaccgtcgacacaatgagcagttcttcgggccagggacacggctcaccgtgctaggtaagaagggggctccaggtgggagagaggggcatgcat

SEQ ID NO: 1237 - DNA, 239 bp, Artificial Sequence
  source: /note="Description of Artificial Sequence: Synthetic polynucleotide"
atgaattcactcctttgatgtcaaagatataaacaaaggagagatctctgatggatacagtgtctctcgacaggcacaggctaaattctctagagtctgccatccccaaccagacagctctttacttctgtgccaccagtggtctcctagtcgacacaatgagcagttcttcgggccagggacacggctcaccgtgctaggtaagaagggggctccaggtgggagagaggggcatgcat

SEQ ID NO: 1238 - DNA, 239 bp, Artificial Sequence
  source: /note="Description of Artificial Sequence: Synthetic polynucleotide"
atgaattctattcctatggagttaattccacagagaagggagatctttcctctgagtcaacagtctccagaataaggacggagcattttcctggagtctgccaggccctcacatacctctcagtacctctgtgccagcagtctgcaatcgtcgacacaatgagcagttcttcgggccagggacacggctcaccgtgctaggtaagaagggggctccaggtgggagagaggggcatgcat

SEQ ID NO: 1239 - DNA, 239 bp, Artificial Sequence
  source: /note="Description of Artificial Sequence: Synthetic polynucleotide"
atgaattctattcaatgaatgttgaggtgactgataagggagatgttcctgaagggtacaaagtctctcgaaaagagaagaggaatttccctggagtcgcccagccccaaccagacctctctgtacttctgtgccagcagttgagcgaagtcgacacaatgagcagttcttcgggccagggacacggctcaccgtgctaggtaagaagggggctccaggtgggagagaggggcatgcat

SEQ ID NO: 1240 - DNA, 239 bp, Artificial Sequence
  source: /note="Description of Artificial Sequence: Synthetic polynucleotide"
atgaattcttctcatatgatgttaaaatgaaagaaaaaggagatattcctgaggggtacagtgtctctagagagaagaaggagcgcttctctggagtccgccagcaccaaccagacatctatgtacctctgtgccagcagtttggactggtcgacacaatgagcagttcttcgggccagggacacggctcaccgtgctaggtaagaagggggctccaggtgggagagaggggcatgcat

SEQ ID NO: 1241 - DNA, 239 bp, Artificial Sequence
  source: /note="Description of Artificial Sequence: Synthetic polynucleotide"
atgaattcgcaaatcagggctctgaggccacatatgagagtggatttgtcattgacaagtttcccatcagccgcccaaacctaacattctactgtgagcaacatgagccctgaagacagcagcatatatctctgcagcgttagcaatccgtcgacacaatgagcagttcttcgggccagggacacggctcaccgtgctaggtaagaagggggctccaggtgggagagaggggcatgcat

SEQ ID NO: 1242 - DNA, 239 bp, Artificial Sequence
  source: /note="Description of Artificial Sequence: Synthetic polynucleotide"
atgaattcctcttctactccgttggtattggccagatcagctctgaggtgccccagaatctctcagcctccagaccccaggaccggcagtagttctaagaagctccttctcagtgactctggcttctatctctgtgcctggcgaactacgtcgacacaatgagcagttcttcgggccagggacacggctcaccgtgctaggtaagaagggggctccaggtgggagagaggggcatgcat

SEQ ID NO: 1243 - DNA, 239 bp, Artificial Sequence
  source: /note="Description of Artificial Sequence: Synthetic polynucleotide"
atgaattcttttataataatgaaatctcagagaagtctgaaatattcgatgatcaattctcagttgaaaggcctgatggatcaaatttcaatccggtccacaaagctggaggactcagccatgtacttctgtgccagcagtcaaggtcagtcgacaccggggagctgttttttggagaaggctctaggctgaccgtactgggtaaggaggcggttggggctccggagagctgcatgcat

SEQ ID NO: 1244 - DNA, 239 bp, Artificial Sequence
  source: /note="Description of Artificial Sequence: Synthetic polynucleotide"
atgaattcagctacaataataaggagctcattataaatgaaacagttccaaatcgcttctcacctaaatctccagacaaagctcacttaaatcaattccctggagcttggtgactctgctgtgtatttctgtgccagcagctacgtacggtcgacaccggggagctgttttttggagaaggctctaggctgaccgtactgggtaaggaggcggttggggctccggagagctgcatgcat

SEQ ID NO: 1245 - DNA, 239 bp, Artificial Sequence
  source: /note="Description of Artificial Sequence: Synthetic polynucleotide"
atgaattcgtctacagctatgagaaactctctataaatgaaagtgtgccaagtcgcttctcacctgaatgccccaacagctctctcttaactacacgccctgcagccagaagactcagccctgtatctctgcgccagcagctacgcgttgtcgacaccggggagctgttttttggagaaggctctaggctgaccgtactgggtaaggaggcggttggggctccggagagctgcatgcat

SEQ ID NO: 1246 - DNA, 239 bp, Artificial Sequence
  source: /note="Description of Artificial Sequence: Synthetic polynucleotide"
atgaattcgtctacaactttaaagaacagactgaaaacaacagtgtgccaagtcgcttctcacctgaatgccccaacagctctcacttatctacacaccctgcagccagaagactcggccctgtatctctgcgccagcagcctcagtgagtcgacaccggggagctgttttttggagaaggctctaggctgaccgtactgggtaaggaggcggttggggctccggagagctgcatgcat

SEQ ID NO: 1247 - DNA, 239 bp, Artificial Sequence
  source: /note="Description of Artificial Sequence: Synthetic polynucleotide"
atgaattcgtctacagtcttgaagaacgggttgaaaacaacagtgtgccaagtcgcttctcacctgaatgccccaacagctctcacttatctacacaccctgcagccagaagactcggccctgtatctctgcgccagcagcgtgtctacgtcgacaccggggagctgttttttggagaaggctctaggctgaccgtactgggtaaggaggcggttggggctccggagagctgcatgcat

SEQ ID NO: 1248 - DNA, 239 bp, Artificial Sequence
  source: /note="Description of Artificial Sequence: Synthetic polynucleotide"
atgaattctgaatacttcagtgagacacagagaaacaaaggaaacttccctggtcgattctcagggcgccagttctctaactctcgctcttgtgagcaccttggagctgggggactcggccctttatctttgcgccagcagagtaccgagtcgacaccggggagctgttttttggagaaggctctaggctgaccgtactgggtaaggaggcggttggggctccggagagctgcatgcat

SEQ ID NO: 1249 - DNA, 239 bp, Artificial Sequence
  source: /note="Description of Artificial Sequence: Synthetic polynucleotide"
atgaattctgaatatgctaatgagttaaggagatcagaaggaaacttccctaatcgattctcagggcgccagttccatgactgttgctcttgtgagtgccttggagctgggggactcggccctgtatctctgtgccagaagttgcctcagtcgacaccggggagctgttttttggagaaggctctaggctgaccgtactgggtaaggaggcggttggggctccggagagctgcatgcat

SEQ ID NO: 1250 - DNA, 239 bp, Artificial Sequence
  source: /note="Description of Artificial Sequence: Synthetic polynucleotide"
atgaattctcagtattatagggaggaagagaatggcagaggaaacttccctcctagattctcaggtctccagttccctaattatagctcttgtgaacgccttggagctggacgactcggccctgtatctctgtgccagcagtcgttagcgtcgacaccggggagctgttttttggagaaggctctaggctgaccgtactgggtaaggaggcggttggggctccggagagctgcatgcat

SEQ ID NO: 1251 - DNA, 239 bp, Artificial Sequence
  source: /note="Description of Artificial Sequence: Synthetic polynucleotide"
atgaattctcagtattatgagaaagaagagagaggaagaggaaacttccctgatcgattctcagctcgccagttccctaactatagctcttgtgaacgccttgttgctgggggactcggccctgtatctctgtgccagcagtggacatggtcgacaccggggagctgttttttggagaaggctctaggctgaccgtactgggtaaggaggcggttggggctccggagagctgcatgcat

SEQ ID NO: 1252 - DNA, 239 bp, Artificial Sequence
  source: /note="Description of Artificial Sequence: Synthetic polynucleotide"
atgaattctcagtattatgaggaggaagagagacagagaggcaacttccctgatcgattctcaggtcaccagttccctaactatagctcttgtgaacgccttgttgctgggggactcggccctctatctctgtgccagcagaggttgctgtcgacaccggggagctgttttttggagaaggctctaggctgaccgtactgggtaaggaggcggttggggctccggagagctgcatgcat

SEQ ID NO: 1253 - DNA, 239 bp, Artificial Sequence
  source: /note="Description of Artificial Sequence: Synthetic polynucleotide"
atgaattctcagtattatgagaaagaagagagaggaagaggaaacttccctgatcaattctcaggtcaccagttccctaactatagctcttgtgaacgccttgttgctaggggactcggccctctatctctgtgccagcaggtacagtggtcgacaccggggagctgttttttggagaaggctctaggctgaccgtactgggtaaggaggcggttggggctccggagagctgcatgcat

SEQ ID NO: 1254 - DNA, 239 bp, Artificial Sequence
  source: /note="Description of Artificial Sequence: Synthetic polynucleotide"
atgaattcttggtatgacgagggtgaagagagaaacagaggaaacttccctcctagattttcaggtcgccagttccctaattatagctcttgtgaacgccttggagctggaggactcggccctgtatctctgtgccagcagatccatgggtcgacaccggggagctgttttttggagaaggctctaggctgaccgtactgggtaaggaggcggttggggctccggagagctgcatgcat

SEQ ID NO: 1255 - DNA, 239 bp, Artificial Sequence
  source: /note="Description of Artificial Sequence: Synthetic polynucleotide"
atgaattctactcagcttctgagggtaccactgacaaaggagaagtccccaatggctacaatgtctccagattaaacaaacgggagttctctggagtcggctgctccctcccagacatctgtgtacttctgtgccagcagttgatgcgagtcgacaccggggagctgttttttggagaaggctctaggctgaccgtactgggtaaggaggcggttggggctccggagagctgcatgcat

SEQ ID NO: 1256 - DNA, 239 bp, Artificial Sequence
  source: /note="Description of Artificial Sequence: Synthetic polynucleotide"
atgaattctactcagttggtgagggtacaactgccaaaggagaggtccctgatggctacaatgtctccagattaaaaaaacagaatttccttggagtcggctgctccctcccaaacatctgtgtacttctgtgccagcagtgtagcagtgtcgacaccggggagctgttttttggagaaggctctaggctgaccgtactgggtaaggaggcggttggggctccggagagctgcatgcat

SEQ ID NO: 1257 - DNA, 239 bp, Artificial Sequence
  source: /note="Description of Artificial Sequence: Synthetic polynucleotide"
atgaattctactcagttggtgagggtacaactgccaaaggagaggtccctgatggctacaatgtctccagattaaaaaaacagaatttccttggagtcggctgctccctcccaaacatctgtgtacttctgtgccagcagtggatcatcgtcgacaccggggagctgttttttggagaaggctctaggctgaccgtactgggtaaggaggcggttggggctccggagagctgcatgcat

SEQ ID NO: 1258 - DNA, 239 bp, Artificial Sequence
  source: /note="Description of Artificial Sequence: Synthetic polynucleotide"
atgaattctattcaaatactgcaggtaccactggcaaaggagaagtccctgatggttatagtgtctccagagcaaacacagatgatttccttggcgtctgctgtaccctctcagacatctgtgtacttctgtgccagcagtgtgaacgtgtcgacaccggggagctgttttttggagaaggctctaggctgaccgtactgggtaaggaggcggttggggctccggagagctgcatgcat

SEQ ID NO: 1259 - DNA, 239 bp, Artificial Sequence
  source: /note="Description of Artificial Sequence: Synthetic polynucleotide"
atgaattctactcagttggtgctggtatcactgaccaaggagaagtccccaatggctacaatgtctccagatcaaccacagaggatttccctgctgtcggctgctccctcccagacatctgtgtacttctgtgccagcagttgtcatcggtcgacaccggggagctgttttttggagaaggctctaggctgaccgtactgggtaaggaggcggttggggctccggagagctgcatgcat

SEQ ID NO: 1260 - DNA, 239 bp, Artificial Sequence
  source: /note="Description of Artificial Sequence: Synthetic polynucleotide"
atgaattctattcagttggtgctggtatcactgacaaaggagaagtcccgaatggctacaacgtctccagatcaaccacagaggatttccctggagttggctgctccctcccagacatctgtgtacttctgtgccagcagtaggcttgagtcgacaccggggagctgttttttggagaaggctctaggctgaccgtactgggtaaggaggcggttggggctccggagagctgcatgcat

SEQ ID NO: 1261 - DNA, 239 bp, Artificial Sequence
  source: /note="Description of Artificial Sequence: Synthetic polynucleotide"
atgaattctactcagttgctgctgctctcactgacaaaggagaagttcccaatggctacaatgtctccagatcaaacacagaggatttccctggagtcagctgctccctctcagacttctgtttacttctgtgccagcagtacacacgtgtcgacaccggggagctgttttttggagaaggctctaggctgaccgtactgggtaaggaggcggttggggctccggagagctgcatgcat

SEQ ID NO: 1262 - DNA, 239 bp, Artificial Sequence
  source: /note="Description of Artificial Sequence: Synthetic polynucleotide"
atgaattctactactcagctgctgctggtactactgacaaagaagtccccaatggctacaatgtctctagattaaacacagaggatttccctggtgtcggctgctccctcccagacatctgtgtacttgtgtgccagcagttccacagtgtcgacaccggggagctgttttttggagaaggctctaggctgaccgtactgggtaaggaggcggttggggctccggagagctgcatgcat

SEQ ID NO: 1263 - DNA, 239 bp, Artificial Sequence
  source: /note="Description of Artificial Sequence: Synthetic polynucleotide"
atgaattctactcagttgctgctggtatcactgacaaaggagaagtccccgatggctacaatgtatccagatcaaacacagaggatttccctggagtcagctgctccctcccagacatctgtatacttctgtgccagcagtcagtctgtgtcgacaccggggagctgttttttggagaaggctctaggctgaccgtactgggtaaggaggcggttggggctccggagagctgcatgcat

SEQ ID NO: 1264 - DNA, 239 bp, Artificial Sequence
  source: /note="Description of Artificial Sequence: Synthetic polynucleotide"
atgaattcttccaaggcaaggatgcagcagacaaatcggggcttccccgtgatcggttctctgcacagaggtctgagggatccatctccattccagcgcacacagcagggggacttggctgtgtatctctgtgccagcagctccatgtggtcgacaccggggagctgttttttggagaaggctctaggctgaccgtactgggtaaggaggcggttggggctccggagagctgcatgcat

SEQ ID NO: 1265 - DNA, 239 bp, Artificial Sequence
  source: /note="Description of Artificial Sequence: Synthetic polynucleotide"
atgaattcttccaaggcaacagtgcaccagacaaatcagggctgcccagtgatcgcttctctgcagagaggactgggggatccgtctccaatccagcgcacacagcaggaggactcggccgtgtatctctgtgccagcagctcactgcagtcgacaccggggagctgttttttggagaaggctctaggctgaccgtactgggtaaggaggcggttggggctccggagagctgcatgcat

SEQ ID NO: 1266 - DNA, 239 bp, Artificial Sequence
  source: /note="Description of Artificial Sequence: Synthetic polynucleotide"
atgaattcttccaaggcacgggtgcggcagatgactcagggctgcccaacgatcggttctttgcagtcaggcctgagggatccgtctctaatccagcgcacagagcggggggactcagccgtgtatctctgtgccagcagccaagtcacgtcgacaccggggagctgttttttggagaaggctctaggctgaccgtactgggtaaggaggcggttggggctccggagagctgcatgcat

SEQ ID NO: 1267 - DNA, 239 bp, Artificial Sequence
  source: /note="Description of Artificial Sequence: Synthetic polynucleotide"
atgaattctcccagagtgatgctcaacgagacaaatcagggcggcccagtggtcggttctctgcagagaggcctgagagatccgtctccaatccagcgcacagagcagggggactcagctgtgtatctctgtgccagcagctagacggagtcgacaccggggagctgttttttggagaaggctctaggctgaccgtactgggtaaggaggcggttggggctccggagagctgcatgcat

SEQ ID NO: 1268 - DNA, 239 bp, Artificial Sequence
  source: /note="Description of Artificial Sequence: Synthetic polynucleotide"
atgaattcttcaattatgaagcccaacaagacaaatcagggctgcccaatgatcggttctctgcagagaggcctgagggatccatctccaatccagcgcacagagcagcgggactcggccatgtatcgctgtgccagcagcgagcgatagtcgacaccggggagctgttttttggagaaggctctaggctgaccgtactgggtaaggaggcggttggggctccggagagctgcatgcat

SEQ ID NO: 1269 - DNA, 239 bp, Artificial Sequence
  source: /note="Description of Artificial Sequence: Synthetic polynucleotide"
atgaattcttcaattatgaagctcaaccagacaaatcagggctgcccagtgatcggttctctgcagagaggcctgagggatccatctccaattcagcgcacagagcagcgggactcagccatgtatcgctgtgccagcagcctcgagaagtcgacaccggggagctgttttttggagaaggctctaggctgaccgtactgggtaaggaggcggttggggctccggagagctgcatgcat

SEQ ID NO: 1270 - DNA, 239 bp, Artificial Sequence
  source: /note="Description of Artificial Sequence: Synthetic polynucleotide"
atgaattcttccagaatgaagctcaactagacaaatcggggctgcccagtgatcgcttctttgcagaaaggcctgagggatccgtctccaatccagcgcacacagcaggaggactccgccgtgtatctctgtgccagcagcatgacaccgtcgacaccggggagctgttttttggagaaggctctaggctgaccgtactgggtaaggaggcggttggggctccggagagctgcatgcat

SEQ ID NO: 1271 - DNA, 239 bp, Artificial Sequence
  source: /note="Description of Artificial Sequence: Synthetic polynucleotide"
atgaattcttccagaatgaagctcaactagaaaaatcaaggctgctcagtgatcggttctctgcagagaggcctaagggatctttctccaatccagcgcacagagcagggggactcggccatgtatctctgtgccagcagccttcacgagtcgacaccggggagctgttttttggagaaggctctaggctgaccgtactgggtaaggaggcggttggggctccggagagctgcatgcat

SEQ ID NO: 1272 - DNA, 239 bp, Artificial Sequence
  source: /note="Description of Artificial Sequence: Synthetic polynucleotide"
atgaattctcagtattataatggagaagagagagcaaaaggaaacattcttgaacgattctccgcacaacagttccctgacttgcactctcctgagctctctggagctgggggactcagctttgtatttctgtgccagcagcgtagagtgtcgacaccggggagctgttttttggagaaggctctaggctgaccgtactgggtaaggaggcggttggggctccggagagctgcatgcat

SEQ ID NO: 1273 - DNA, 239 bp, Artificial Sequence
  source: /note="Description of Artificial Sequence: Synthetic polynucleotide"
atgaattctactcatatggtgttcacgacactaacaaaggagaagtctcagatggctacagtgtctctagatcaaacacagaggacctccctggagtctgctgcctcctcccagacatctgtatatttctgcgccagcagttcgtcgatgtcgacaccggggagctgttttttggagaaggctctaggctgaccgtactgggtaaggaggcggttggggctccggagagctgcatgcat

SEQ ID NO: 1274 - DNA, 239 bp, Artificial Sequence
  source: /note="Description of Artificial Sequence: Synthetic polynucleotide"
atgaattctactcagcagctgctgatattacagataaaggagaagtccccgatggctatgttgtctccagatccaagacagagaatttccctggagtcagctacccgctcccagacatctgtgtatttctgcgccagcagtagctagtggtcgacaccggggagctgttttttggagaaggctctaggctgaccgtactgggtaaggaggcggttggggctccggagagctgcatgcat

SEQ ID NO: 1275 - DNA, 239 bp, Artificial Sequence
  source: /note="Description of Artificial Sequence: Synthetic polynucleotide"
atgaattctactcatatggtgttaaagatactgacaaaggagaagtctcagatggctatagtgtctctagatcaaagacagaggatttccctggagtccgctaccagctcccagacatctgtgtacttctgtgccatcagttgagacctgtcgacaccggggagctgttttttggagaaggctctaggctgaccgtactgggtaaggaggcggttggggctccggagagctgcatgcat

SEQ ID NO: 1276 - DNA, 239 bp, Artificial Sequence
  source: /note="Description of Artificial Sequence: Synthetic polynucleotide"
atgaattctttcaggatgagagtgtagtagatgattcacagttgcctaaggatcgattttctgcagagaggctcaaaggagtagactccaatccagcctgcagagcttggggactcggccatgtatctctgtgccagcagcgatggcttgtcgacaccggggagctgttttttggagaaggctctaggctgaccgtactgggtaaggaggcggttggggctccggagagctgcatgcat

SEQ ID NO: 1277 - DNA, 239 bp, Artificial Sequence
  source: /note="Description of Artificial Sequence: Synthetic polynucleotide"
atgaattctttcagaataacggtgtagtggatgattcacagttgcctaaggatcgattttctgcagagaggctcaaaggagtagactccaatccagcctgcaaagcttgaggactcggccgtgtatctctgtgccagcagcgcatctgagtcgacaccggggagctgttttttggagaaggctctaggctgaccgtactgggtaaggaggcggttggggctccggagagctgcatgcat

SEQ ID NO: 1278 - DNA, 239 bp, Artificial Sequence
  source: /note="Description of Artificial Sequence: Synthetic polynucleotide"
atgaattctatgagaatgaggaagcagtagacgattcacagttgcctaaggatcgattttctgcagagaggctcaaaggagtagactccaatccagcctgcagagcttggggactcggccgtgtatctctgtgccagcagcgacactctgtcgacaccggggagctgttttttggagaaggctctaggctgaccgtactgggtaaggaggcggttggggctccggagagctgcatgcat

SEQ ID NO: 1279 - DNA, 239 bp, Artificial Sequence
  source: /note="Description of Artificial Sequence: Synthetic polynucleotide"
atgaattctttaacaacaacgttccgatagatgattcagggatgcccgaggatcgattctcagctaagatgcctaatgcatcattctccaatccagccctcagaacccagggactcagctgtgtacttctgtgccagcagttgctacacgtcgacaccggggagctgttttttggagaaggctctaggctgaccgtactgggtaaggaggcggttggggctccggagagctgcatgcat

SEQ ID NO: 1280 - DNA, 239 bp, Artificial Sequence
  source: /note="Description of Artificial Sequence: Synthetic polynucleotide"
atgaattctttaacaacaacgttccgatagatgattcagggatgcccgaggatcgattctcagctaagatgcctaatgcatcattctccaatccagccctcagaacccagggactcagctgtgtacttctgtgccagcagttcagcttggtcgacaccggggagctgttttttggagaaggctctaggctgaccgtactgggtaaggaggcggttggggctccggagagctgcatgcat

SEQ ID NO: 1281 - DNA, 239 bp, Artificial Sequence
  source: /note="Description of Artificial Sequence: Synthetic polynucleotide"
atgaattcttccgcaaccgggctcctctagatgattcggggatgccgaaggatcgattctcagcagagatgcctgatgcaactttagccaatccagccctcagaacccagggactcagctgtgtatttttgtgctagtggtttcggaacgtcgacaccggggagctgttttttggagaaggctctaggctgaccgtactgggtaaggaggcggttggggctccggagagctgcatgcat

SEQ ID NO: 1282 - DNA, 239 bp, Artificial Sequence
  source: /note="Description of Artificial Sequence: Synthetic polynucleotide"
atgaattctcgttttatgaaaagatgcagagcgataaaggaagcatccctgatcgattctcagctcaacagttcagtgactatcattctgatgagctccttggagctgggggactcagccctgtacttctgtgccagcagcgcaattcggtcgacaccggggagctgttttttggagaaggctctaggctgaccgtactgggtaaggaggcggttggggctccggagagctgcatgcat

SEQ ID NO: 1283 - DNA, 239 bp, Artificial Sequence
  source: /note="Description of Artificial Sequence: Synthetic polynucleotide"
atgaattctttgtgaaagagtctaaacaggatgagtccggtatgcccaacaatcgattcttagctgaaaggactggagggacgtattctagtgcagcctgcagaactggaggattctggagtttatttctgtgccagcagccaagaggtgtcgacaccggggagctgttttttggagaaggctctaggctgaccgtactgggtaaggaggcggttggggctccggagagctgcatgcat

SEQ ID NO: 1284 - DNA, 239 bp, Artificial Sequence
  source: /note="Description of Artificial Sequence: Synthetic polynucleotide"
atgaattccactactatgacaaagattttaacaatgaagcagacacccctgataacttccaatccaggaggccgaacacttctttctgctatccgctcaccaggcctgggggacgcagccatgtacctgtgtgccaccagcgaatggacgtcgacaccggggagctgttttttggagaaggctctaggctgaccgtactgggtaaggaggcggttggggctccggagagctgcatgcat

SEQ ID NO: 1285 - DNA, 239 bp, Artificial Sequence
  source: /note="Description of Artificial Sequence: Synthetic polynucleotide"
atgaattcttccagaatgaaaatgtctttgatgaaacaggtatgcccaaggaaagattttcagctaagtgcctcccaaattcaccctgtaatccaggctacgaagcttgaggattcagcagtgtatttttgtgccagcagcaactgccagtcgacaccggggagctgttttttggagaaggctctaggctgaccgtactgggtaaggaggcggttggggctccggagagctgcatgcat

SEQ ID NO: 1286 - DNA, 239 bp, Artificial Sequence
  source: /note="Description of Artificial Sequence: Synthetic polynucleotide"
atgaattctccttccagtaccaaaacattgcagttgattcagggatgcccaaggaacgattcacagctgaaagacctaacggaacgtcttaagatccatcccgcagagccgagggactcagccgtgtatctctacagtagccctagtaggtcgacaccggggagctgttttttggagaaggctctaggctgaccgtactgggtaaggaggcggttggggctccggagagctgcatgcat

SEQ ID NO: 1287 - DNA, 239 bp, Artificial Sequence
  source: /note="Description of Artificial Sequence: Synthetic polynucleotide"
atgaattcctccagaaagaaaatatcatagatgagtcaggaatgccaaaggaacgattttctgctgaatttcccaaagagggccccagcaatccagcaggtagtgcgaggagattcggcagcttatttctgtgccagctcactgacgttgtcgacaccggggagctgttttttggagaaggctctaggctgaccgtactgggtaaggaggcggttggggctccggagagctgcatgcat

SEQ ID NO: 1288 - DNA, 239 bp, Artificial Sequence
  source: /note="Description of Artificial Sequence: Synthetic polynucleotide"
atgaattctactcacagatagtaaatgactttcagaaaggagatatagctgaagggtacagcgtctctcgggagaagaaggaatcctttcgtgacatcggcccaaaagaacccgacagctttctatctctgtgccagtagttgcagacagtcgacaccggggagctgttttttggagaaggctctaggctgaccgtactgggtaaggaggcggttggggctccggagagctgcatgcat

SEQ ID NO: 1289 - DNA, 239 bp, Artificial Sequence
  source: /note="Description of Artificial Sequence: Synthetic polynucleotide"
atgaattctccaatgagggctccaaggccacatacgagcaaggcgtcgagaaggacaagtttctcatcaaccatgcaagcctgaccttgtacagtgaccagtgcccatcctgaagacagcagcttctacatctgcagtgctagttgaccgtcgacaccggggagctgttttttggagaaggctctaggctgaccgtactgggtaaggaggcggttggggctccggagagctgcatgcat

SEQ ID NO: 1290 - DNA, 239 bp, Artificial Sequence
  source: /note="Description of Artificial Sequence: Synthetic polynucleotide"
atgaattcactcctttgatgtcaaagatataaacaaaggagagatctctgatggatacagtgtctctcgacaggcacaggctaaattctctagagtctgccatccccaaccagacagctctttacttctgtgccaccagtggtctcctagtcgacaccggggagctgttttttggagaaggctctaggctgaccgtactgggtaaggaggcggttggggctccggagagctgcatgcat

SEQ ID NO: 1291 - DNA, 239 bp, Artificial Sequence
  source: /note="Description of Artificial Sequence: Synthetic polynucleotide"
atgaattctattcctatggagttaattccacagagaagggagatctttcctctgagtcaacagtctccagaataaggacggagcattttcctggagtctgccaggccctcacatacctctcagtacctctgtgccagcagtctgcaatcgtcgacaccggggagctgttttttggagaaggctctaggctgaccgtactgggtaaggaggcggttggggctccggagagctgcatgcat

SEQ ID NO: 1292 - DNA, 239 bp, Artificial Sequence
  source: /note="Description of Artificial Sequence: Synthetic polynucleotide"
atgaattctattcaatgaatgttgaggtgactgataagggagatgttcctgaagggtacaaagtctctcgaaaagagaagaggaatttccctggagtcgcccagccccaaccagacctctctgtacttctgtgccagcagttgagcgaagtcgacaccggggagctgttttttggagaaggctctaggctgaccgtactgggtaaggaggcggttggggctccggagagctgcatgcat

SEQ ID NO: 1293 - DNA, 239 bp, Artificial Sequence
  source: /note="Description of Artificial Sequence: Synthetic polynucleotide"
atgaattcttctcatatgatgttaaaatgaaagaaaaaggagatattcctgaggggtacagtgtctctagagagaagaaggagcgcttctctggagtccgccagcaccaaccagacatctatgtacctctgtgccagcagtttggactggtcgacaccggggagctgttttttggagaaggctctaggctgaccgtactgggtaaggaggcggttggggctccggagagctgcatgcat

SEQ ID NO: 1294 - DNA, 239 bp, Artificial Sequence
  source: /note="Description of Artificial Sequence: Synthetic polynucleotide"
atgaattcgcaaatcagggctctgaggccacatatgagagtggatttgtcattgacaagtttcccatcagccgcccaaacctaacattctactgtgagcaacatgagccctgaagacagcagcatatatctctgcagcgttagcaatccgtcgacaccggggagctgttttttggagaaggctctaggctgaccgtactgggtaaggaggcggttggggctccggagagctgcatgcat

SEQ ID NO: 1295 - DNA, 239 bp, Artificial Sequence
  source: /note="Description of Artificial Sequence: Synthetic polynucleotide"
atgaattcctcttctactccgttggtattggccagatcagctctgaggtgccccagaatctctcagcctccagaccccaggaccggcagtagttctaagaagctccttctcagtgactctggcttctatctctgtgcctggcgaactacgtcgacaccggggagctgttttttggagaaggctctaggctgaccgtactgggtaaggaggcggttggggctccggagagctgcatgcat

SEQ ID NO: 1296 - DNA, 239 bp, Artificial Sequence
  source: /note="Description of Artificial Sequence: Synthetic polynucleotide"
atgaattcttttataataatgaaatctcagagaagtctgaaatattcgatgatcaattctcagttgaaaggcctgatggatcaaatttcaatccggtccacaaagctggaggactcagccatgtacttctgtgccagcagtcaaggtcagtcgacagatacgcagtattttggcccaggcacccggctgacagtgctcggtaagcgggggctcccgctgaagccccggaacgcatgcat

SEQ ID NO: 1297 - DNA, 239 bp, Artificial Sequence
  source: /note="Description of Artificial Sequence: Synthetic polynucleotide"
atgaattcagctacaataataaggagctcattataaatgaaacagttccaaatcgcttctcacctaaatctccagacaaagctcacttaaatcaattccctggagcttggtgactctgctgtgtatttctgtgccagcagctacgtacggtcgacagatacgcagtattttggcccaggcacccggctgacagtgctcggtaagcgggggctcccgctgaagccccggaacgcatgcat

SEQ ID NO: 1298 - DNA, 239 bp, Artificial Sequence
  source: /note="Description of Artificial Sequence: Synthetic polynucleotide"
atgaattcgtctacagctatgagaaactctctataaatgaaagtgtgccaagtcgcttctcacctgaatgccccaacagctctctcttaactacacgccctgcagccagaagactcagccctgtatctctgcgccagcagctacgcgttgtcgacagatacgcagtattttggcccaggcacccggctgacagtgctcggtaagcgggggctcccgctgaagccccggaacgcatgcat

SEQ ID NO: 1299 - DNA, 239 bp, Artificial Sequence
  source: /note="Description of Artificial Sequence: Synthetic polynucleotide"
atgaattcgtctacaactttaaagaacagactgaaaacaacagtgtgccaagtcgcttctcacctgaatgccccaacagctctcacttatctacacaccctgcagccagaagactcggccctgtatctctgcgccagcagcctcagtgagtcgacagatacgcagtattttggcccaggcacccggctgacagtgctcggtaagcgggggctcccgctgaagccccggaacgcatgcat

SEQ ID NO: 1300 - DNA, 239 bp, Artificial Sequence
  source: /note="Description of Artificial Sequence: Synthetic polynucleotide"
atgaattcgtctacagtcttgaagaacgggttgaaaacaacagtgtgccaagtcgcttctcacctgaatgccccaacagctctcacttatctacacaccctgcagccagaagactcggccctgtatctctgcgccagcagcgtgtctacgtcgacagatacgcagtattttggcccaggcacccggctgacagtgctcggtaagcgggggctcccgctgaagccccggaacgcatgcat

SEQ ID NO: 1301 - DNA, 239 bp, Artificial Sequence
  source: /note="Description of Artificial Sequence: Synthetic polynucleotide"
atgaattctgaatacttcagtgagacacagagaaacaaaggaaacttccctggtcgattctcagggcgccagttctctaactctcgctcttgtgagcaccttggagctgggggactcggccctttatctttgcgccagcagagtaccgagtcgacagatacgcagtattttggcccaggcacccggctgacagtgctcggtaagcgggggctcccgctgaagccccggaacgcatgcat

SEQ ID NO: 1302 - DNA, 239 bp, Artificial Sequence
  source: /note="Description of Artificial Sequence: Synthetic polynucleotide"
atgaattctgaatatgctaatgagttaaggagatcagaaggaaacttccctaatcgattctcagggcgccagttccatgactgttgctcttgtgagtgccttggagctgggggactcggccctgtatctctgtgccagaagttgcctcagtcgacagatacgcagtattttggcccaggcacccggctgacagtgctcggtaagcgggggctcccgctgaagccccggaacgcatgcat

SEQ ID NO: 1303 - DNA, 239 bp, Artificial Sequence
  source: /note="Description of Artificial Sequence: Synthetic polynucleotide"
atgaattctcagtattatagggaggaagagaatggcagaggaaacttccctcctagattctcaggtctccagttccctaattatagctcttgtgaacgccttggagctggacgactcggccctgtatctctgtgccagcagtcgttagcgtcgacagatacgcagtattttggcccaggcacccggctgacagtgctcggtaagcgggggctcccgctgaagccccggaacgcatgcat

SEQ ID NO: 1304 - DNA, 239 bp, Artificial Sequence
  source: /note="Description of Artificial Sequence: Synthetic polynucleotide"
atgaattctcagtattatgagaaagaagagagaggaagaggaaacttccctgatcgattctcagctcgccagttccctaactatagctcttgtgaacgccttgttgctgggggactcggccctgtatctctgtgccagcagtggacatggtcgacagatacgcagtattttggcccaggcacccggctgacagtgctcggtaagcgggggctcccgctgaagccccggaacgcatgcat

SEQ ID NO: 1305 - DNA, 239 bp, Artificial Sequence
  source: /note="Description of Artificial Sequence: Synthetic polynucleotide"
atgaattctcagtattatgaggaggaagagagacagagaggcaacttccctgatcgattctcaggtcaccagttccctaactatagctcttgtgaacgccttgttgctgggggactcggccctctatctctgtgccagcagaggttgctgtcgacagatacgcagtattttggcccaggcacccggctgacagtgctcggtaagcgggggctcccgctgaagccccggaacgcatgcat

SEQ ID NO: 1306 - DNA, 239 bp, Artificial Sequence
  source: /note="Description of Artificial Sequence: Synthetic polynucleotide"
atgaattctcagtattatgagaaagaagagagaggaagaggaaacttccctgatcaattctcaggtcaccagttccctaactatagctcttgtgaacgccttgttgctaggggactcggccctctatctctgtgccagcaggtacagtggtcgacagatacgcagtattttggcccaggcacccggctgacagtgctcggtaagcgggggctcccgctgaagccccggaacgcatgcat

SEQ ID NO: 1307 - DNA, 239 bp, Artificial Sequence
  source: /note="Description of Artificial Sequence: Synthetic polynucleotide"
atgaattcttggtatgacgagggtgaagagagaaacagaggaaacttccctcctagattttcaggtcgccagttccctaattatagctcttgtgaacgccttggagctggaggactcggccctgtatctctgtgccagcagatccatgggtcgacagatacgcagtattttggcccaggcacccggctgacagtgctcggtaagcgggggctcccgctgaagccccggaacgcatgcat

SEQ ID NO: 1308 - DNA, 239 bp, Artificial Sequence
  source: /note="Description of Artificial Sequence: Synthetic polynucleotide"
atgaattctactcagcttctgagggtaccactgacaaaggagaagtccccaatggctacaatgtctccagattaaacaaacgggagttctctggagtcggctgctccctcccagacatctgtgtacttctgtgccagcagttgatgcgagtcgacagatacgcagtattttggcccaggcacccggctgacagtgctcggtaagcgggggctcccgctgaagccccggaacgcatgcat

SEQ ID NO: 1309 - DNA, 239 bp, Artificial Sequence
  source: /note="Description of Artificial Sequence: Synthetic polynucleotide"
atgaattctactcagttggtgagggtacaactgccaaaggagaggtccctgatggctacaatgtctccagattaaaaaaacagaatttccttggagtcggctgctccctcccaaacatctgtgtacttctgtgccagcagtgtagcagtgtcgacagatacgcagtattttggcccaggcacccggctgacagtgctcggtaagcgggggctcccgctgaagccccggaacgcatgcat

SEQ ID NO: 1310 - DNA, 239 bp, Artificial Sequence
  source: /note="Description of Artificial Sequence: Synthetic polynucleotide"
atgaattctactcagttggtgagggtacaactgccaaaggagaggtccctgatggctacaatgtctccagattaaaaaaacagaatttccttggagtcggctgctccctcccaaacatctgtgtacttctgtgccagcagtggatcatcgtcgacagatacgcagtattttggcccaggcacccggctgacagtgctcggtaagcgggggctcccgctgaagccccggaacgcatgcat

SEQ ID NO: 1311 - DNA, 239 bp, Artificial Sequence
  source: /note="Description of Artificial Sequence: Synthetic polynucleotide"
atgaattctattcaaatactgcaggtaccactggcaaaggagaagtccctgatggttatagtgtctccagagcaaacacagatgatttccttggcgtctgctgtaccctctcagacatctgtgtacttctgtgccagcagtgtgaacgtgtcgacagatacgcagtattttggcccaggcacccggctgacagtgctcggtaagcgggggctcccgctgaagccccggaacgcatgcat

SEQ ID NO: 1312 - DNA, 239 bp, Artificial Sequence
  source: /note="Description of Artificial Sequence: Synthetic polynucleotide"
atgaattctactcagttggtgctggtatcactgaccaaggagaagtccccaatggctacaatgtctccagatcaaccacagaggatttccctgctgtcggctgctccctcccagacatctgtgtacttctgtgccagcagttgtcatcggtcgacagatacgcagtattttggcccaggcacccggctgacagtgctcggtaagcgggggctcccgctgaagccccggaacgcatgcat

SEQ ID NO: 1313 - DNA, 239 bp, Artificial Sequence
  source: /note="Description of Artificial Sequence: Synthetic polynucleotide"
atgaattctattcagttggtgctggtatcactgacaaaggagaagtcccgaatggctacaacgtctccagatcaaccacagaggatttccctggagttggctgctccctcccagacatctgtgtacttctgtgccagcagtaggcttgagtcgacagatacgcagtattttggcccaggcacccggctgacagtgctcggtaagcgggggctcccgctgaagccccggaacgcatgcat

SEQ ID NO: 1314 - DNA, 239 bp, Artificial Sequence
  source: /note="Description of Artificial Sequence: Synthetic polynucleotide"
atgaattctactcagttgctgctgctctcactgacaaaggagaagttcccaatggctacaatgtctccagatcaaacacagaggatttccctggagtcagctgctccctctcagacttctgtttacttctgtgccagcagtacacacgtgtcgacagatacgcagtattttggcccaggcacccggctgacagtgctcggtaagcgggggctcccgctgaagccccggaacgcatgcat

SEQ ID NO: 1315 - DNA, 239 bp, Artificial Sequence
  source: /note="Description of Artificial Sequence: Synthetic polynucleotide"
atgaattctactactcagctgctgctggtactactgacaaagaagtccccaatggctacaatgtctctagattaaacacagaggatttccctggtgtcggctgctccctcccagacatctgtgtacttgtgtgccagcagttccacagtgtcgacagatacgcagtattttggcccaggcacccggctgacagtgctcggtaagcgggggctcccgctgaagccccggaacgcatgcat

SEQ ID NO: 1316 - DNA, 239 bp, Artificial Sequence
  source: /note="Description of Artificial Sequence: Synthetic polynucleotide"
atgaattctactcagttgctgctggtatcactgacaaaggagaagtccccgatggctacaatgtatccagatcaaacacagaggatttccctggagtcagctgctccctcccagacatctgtatacttctgtgccagcagtcagtctgtgtcgacagatacgcagtattttggcccaggcacccggctgacagtgctcggtaagcgggggctcccgctgaagccccggaacgcatgcat

SEQ ID NO: 1317 - DNA, 239 bp, Artificial Sequence
  source: /note="Description of Artificial Sequence: Synthetic polynucleotide"
atgaattcttccaaggcaaggatgcagcagacaaatcggggcttccccgtgatcggttctctgcacagaggtctgagggatccatctccattccagcgcacacagcagggggacttggctgtgtatctctgtgccagcagctccatgtggtcgacagatacgcagtattttggcccaggcacccggctgacagtgctcggtaagcgggggctcccgctgaagccccggaacgcatgcat

SEQ ID NO: 1318 - DNA, 239 bp, Artificial Sequence
  source: /note="Description of Artificial Sequence: Synthetic polynucleotide"
atgaattcttccaaggcaacagtgcaccagacaaatcagggctgcccagtgatcgcttctctgcagagaggactgggggatccgtctccaatccagcgcacacagcaggaggactcggccgtgtatctctgtgccagcagctcactgcagtcgacagatacgcagtattttggcccaggcacccggctgacagtgctcggtaagcgggggctcccgctgaagccccggaacgcatgcat

SEQ ID NO: 1319 - DNA, 239 bp, Artificial Sequence
  source: /note="Description of Artificial Sequence: Synthetic polynucleotide"
atgaattcttccaaggcacgggtgcggcagatgactcagggctgcccaacgatcggttctttgcagtcaggcctgagggatccgtctctaatccagcgcacagagcggggggactcagccgtgtatctctgtgccagcagccaagtcacgtcgacagatacgcagtattttggcccaggcacccggctgacagtgctcggtaagcgggggctcccgctgaagccccggaacgcatgcat

SEQ ID NO: 1320 - DNA, 239 bp, Artificial Sequence
  source: /note="Description of Artificial Sequence: Synthetic polynucleotide"
atgaattctcccagagtgatgctcaacgagacaaatcagggcggcccagtggtcggttctctgcagagaggcctgagagatccgtctccaatccagcgcacagagcagggggactcagctgtgtatctctgtgccagcagctagacggagtcgacagatacgcagtattttggcccaggcacccggctgacagtgctcggtaagcgggggctcccgctgaagccccggaacgcatgcat

SEQ ID NO: 1321 - DNA, 239 bp, Artificial Sequence
  source: /note="Description of Artificial Sequence: Synthetic polynucleotide"
atgaattcttcaattatgaagcccaacaagacaaatcagggctgcccaatgatcggttctctgcagagaggcctgagggatccatctccaatccagcgcacagagcagcgggactcggccatgtatcgctgtgccagcagcgagcgatagtcgacagatacgcagtattttggcccaggcacccggctgacagtgctcggtaagcgggggctcccgctgaagccccggaacgcatgcat

SEQ ID NO: 1322 - DNA, 239 bp, Artificial Sequence
  source: /note="Description of Artificial Sequence: Synthetic polynucleotide"
atgaattcttcaattatgaagctcaaccagacaaatcagggctgcccagtgatcggttctctgcagagaggcctgagggatccatctccaattcagcgcacagagcagcgggactcagccatgtatcgctgtgccagcagcctcgagaagtcgacagatacgcagtattttggcccaggcacccggctgacagtgctcggtaagcgggggctcccgctgaagccccggaacgcatgcat

SEQ ID NO: 1323 - DNA, 239 bp, Artificial Sequence
  source: /note="Description of Artificial Sequence: Synthetic polynucleotide"
atgaattcttccagaatgaagctcaactagacaaatcggggctgcccagtgatcgcttctttgcagaaaggcctgagggatccgtctccaatccagcgcacacagcaggaggactccgccgtgtatctctgtgccagcagcatgacaccgtcgacagatacgcagtattttggcccaggcacccggctgacagtgctcggtaagcgggggctcccgctgaagccccggaacgcatgcat

SEQ ID NO: 1324 - DNA, 239 bp, Artificial Sequence
  source: /note="Description of Artificial Sequence: Synthetic polynucleotide"
atgaattcttccagaatgaagctcaactagaaaaatcaaggctgctcagtgatcggttctctgcagagaggcctaagggatctttctccaatccagcgcacagagcagggggactcggccatgtatctctgtgccagcagccttcacgagtcgacagatacgcagtattttggcccaggcacccggctgacagtgctcggtaagcgggggctcccgctgaagccccggaacgcatgcat

SEQ ID NO: 1325 - DNA, 239 bp, Artificial Sequence
  source: /note="Description of Artificial Sequence: Synthetic polynucleotide"
atgaattctcagtattataatggagaagagagagcaaaaggaaacattcttgaacgattctccgcacaacagttccctgacttgcactctcctgagctctctggagctgggggactcagctttgtatttctgtgccagcagcgtagagtgtcgacagatacgcagtattttggcccaggcacccggctgacagtgctcggtaagcgggggctcccgctgaagccccggaacgcatgcat

SEQ ID NO: 1326 - DNA, 239 bp, Artificial Sequence
  source: /note="Description of Artificial Sequence: Synthetic polynucleotide"
atgaattctactcatatggtgttcacgacactaacaaaggagaagtctcagatggctacagtgtctctagatcaaacacagaggacctccctggagtctgctgcctcctcccagacatctgtatatttctgcgccagcagttcgtcgatgtcgacagatacgcagtattttggcccaggcacccggctgacagtgctcggtaagcgggggctcccgctgaagccccggaacgcatgcat

SEQ ID NO: 1327 - DNA, 239 bp, Artificial Sequence
  source: /note="Description of Artificial Sequence: Synthetic polynucleotide"
atgaattctactcagcagctgctgatattacagataaaggagaagtccccgatggctatgttgtctccagatccaagacagagaatttccctggagtcagctacccgctcccagacatctgtgtatttctgcgccagcagtagctagtggtcgacagatacgcagtattttggcccaggcacccggctgacagtgctcggtaagcgggggctcccgctgaagccccggaacgcatgcat

SEQ ID NO: 1328 - DNA, 239 bp, Artificial Sequence
  source: /note="Description of Artificial Sequence: Synthetic polynucleotide"
atgaattctactcatatggtgttaaagatactgacaaaggagaagtctcagatggctatagtgtctctagatcaaagacagaggatttccctggagtccgctaccagctcccagacatctgtgtacttctgtgccatcagttgagacctgtcgacagatacgcagtattttggcccaggcacccggctgacagtgctcggtaagcgggggctcccgctgaagccccggaacgcatgcat

SEQ ID NO: 1329 - DNA, 239 bp, Artificial Sequence
  source: /note="Description of Artificial Sequence: Synthetic polynucleotide"
atgaattctttcaggatgagagtgtagtagatgattcacagttgcctaaggatcgattttctgcagagaggctcaaaggagtagactccaatccagcctgcagagcttggggactcggccatgtatctctgtgccagcagcgatggcttgtcgacagatacgcagtattttggcccaggcacccggctgacagtgctcggtaagcgggggctcccgctgaagccccggaacgcatgcat

SEQ ID NO: 1330 - DNA, 239 bp, Artificial Sequence
  source: /note="Description of Artificial Sequence: Synthetic polynucleotide"
atgaattctttcagaataacggtgtagtggatgattcacagttgcctaaggatcgattttctgcagagaggctcaaaggagtagactccaatccagcctgcaaagcttgaggactcggccgtgtatctctgtgccagcagcgcatctgagtcgacagatacgcagtattttggcccaggcacccggctgacagtgctcggtaagcgggggctcccgctgaagccccggaacgcatgcat

SEQ ID NO: 1331 - DNA, 239 bp, Artificial Sequence
  source: /note="Description of Artificial Sequence: Synthetic polynucleotide"
atgaattctatgagaatgaggaagcagtagacgattcacagttgcctaaggatcgattttctgcagagaggctcaaaggagtagactccaatccagcctgcagagcttggggactcggccgtgtatctctgtgccagcagcgacactctgtcgacagatacgcagtattttggcccaggcacccggctgacagtgctcggtaagcgggggctcccgctgaagccccggaacgcatgcat

SEQ ID NO: 1332 - DNA, 239 bp, Artificial Sequence
  source: /note="Description of Artificial Sequence: Synthetic polynucleotide"
atgaattctttaacaacaacgttccgatagatgattcagggatgcccgaggatcgattctcagctaagatgcctaatgcatcattctccaatccagccctcagaacccagggactcagctgtgtacttctgtgccagcagttgctacacgtcgacagatacgcagtattttggcccaggcacccggctgacagtgctcggtaagcgggggctcccgctgaagccccggaacgcatgcat

SEQ ID NO: 1333 - DNA, 239 bp, Artificial Sequence
  source: /note="Description of Artificial Sequence: Synthetic polynucleotide"
atgaattctttaacaacaacgttccgatagatgattcagggatgcccgaggatcgattctcagctaagatgcctaatgcatcattctccaatccagccctcagaacccagggactcagctgtgtacttctgtgccagcagttcagcttggtcgacagatacgcagtattttggcccaggcacccggctgacagtgctcggtaagcgggggctcccgctgaagccccggaacgcatgcat

SEQ ID NO: 1334 - DNA, 239 bp, Artificial Sequence
  source: /note="Description of Artificial Sequence: Synthetic polynucleotide"
atgaattcttccgcaaccgggctcctctagatgattcggggatgccgaaggatcgattctcagcagagatgcctgatgcaactttagccaatccagccctcagaacccagggactcagctgtgtatttttgtgctagtggtttcggaacgtcgacagatacgcagtattttggcccaggcacccggctgacagtgctcggtaagcgggggctcccgctgaagccccggaacgcatgcat

SEQ ID NO: 1335 - DNA, 239 bp, Artificial Sequence
  source: /note="Description of Artificial Sequence: Synthetic polynucleotide"
atgaattctcgttttatgaaaagatgcagagcgataaaggaagcatccctgatcgattctcagctcaacagttcagtgactatcattctgatgagctccttggagctgggggactcagccctgtacttctgtgccagcagcgcaattcggtcgacagatacgcagtattttggcccaggcacccggctgacagtgctcggtaagcgggggctcccgctgaagccccggaacgcatgcat

SEQ ID NO: 1336 - DNA, 239 bp, Artificial Sequence
  source: /note="Description of Artificial Sequence: Synthetic polynucleotide"
atgaattctttgtgaaagagtctaaacaggatgagtccggtatgcccaacaatcgattcttagctgaaaggactggagggacgtattctagtgcagcctgcagaactggaggattctggagtttatttctgtgccagcagccaagaggtgtcgacagatacgcagtattttggcccaggcacccggctgacagtgctcggtaagcgggggctcccgctgaagccccggaacgcatgcat

SEQ ID NO: 1337 - DNA, 239 bp, Artificial Sequence
  source: /note="Description of Artificial Sequence: Synthetic polynucleotide"
atgaattccactactatgacaaagattttaacaatgaagcagacacccctgataacttccaatccaggaggccgaacacttctttctgctatccgctcaccaggcctgggggacgcagccatgtacctgtgtgccaccagcgaatggacgtcgacagatacgcagtattttggcccaggcacccggctgacagtgctcggtaagcgggggctcccgctgaagccccggaacgcatgcat

SEQ ID NO: 1338 - DNA, 239 bp, Artificial Sequence
  source: /note="Description of Artificial Sequence: Synthetic polynucleotide"
atgaattcttccagaatgaaaatgtctttgatgaaacaggtatgcccaaggaaagattttcagctaagtgcctcccaaattcaccctgtaatccaggctacgaagcttgaggattcagcagtgtatttttgtgccagcagcaactgccagtcgacagatacgcagtattttggcccaggcacccggctgacagtgctcggtaagcgggggctcccgctgaagccccggaacgcatgcat

SEQ ID NO: 1339 - DNA, 239 bp, Artificial Sequence
  source: /note="Description of Artificial Sequence: Synthetic polynucleotide"
atgaattctccttccagtaccaaaacattgcagttgattcagggatgcccaaggaacgattcacagctgaaagacctaacggaacgtcttaagatccatcccgcagagccgagggactcagccgtgtatctctacagtagccctagtaggtcgacagatacgcagtattttggcccaggcacccggctgacagtgctcggtaagcgggggctcccgctgaagccccggaacgcatgcat

SEQ ID NO: 1340 - DNA, 239 bp, Artificial Sequence
  source: /note="Description of Artificial Sequence: Synthetic polynucleotide"
atgaattcctccagaaagaaaatatcatagatgagtcaggaatgccaaaggaacgattttctgctgaatttcccaaagagggccccagcaatccagcaggtagtgcgaggagattcggcagcttatttctgtgccagctcactgacgttgtcgacagatacgcagtattttggcccaggcacccggctgacagtgctcggtaagcgggggctcccgctgaagccccggaacgcatgcat

SEQ ID NO: 1341 - DNA, 239 bp, Artificial Sequence
  source: /note="Description of Artificial Sequence: Synthetic polynucleotide"
atgaattctactcacagatagtaaatgactttcagaaaggagatatagctgaagggtacagcgtctctcgggagaagaaggaatcctttcgtgacatcggcccaaaagaacccgacagctttctatctctgtgccagtagttgcagacagtcgacagatacgcagtattttggcccaggcacccggctgacagtgctcggtaagcgggggctcccgctgaagccccggaacgcatgcat

SEQ ID NO: 1342 - DNA, 239 bp, Artificial Sequence
  source: /note="Description of Artificial Sequence: Synthetic polynucleotide"
atgaattctccaatgagggctccaaggccacatacgagcaaggcgtcgagaaggacaagtttctcatcaaccatgcaagcctgaccttgtacagtgaccagtgcccatcctgaagacagcagcttctacatctgcagtgctagttgaccgtcgacagatacgcagtattttggcccaggcacccggctgacagtgctcggtaagcgggggctcccgctgaagccccggaacgcatgcat

SEQ ID NO: 1343 - DNA, 239 bp, Artificial Sequence
  source: /note="Description of Artificial Sequence: Synthetic polynucleotide"
atgaattcactcctttgatgtcaaagatataaacaaaggagagatctctgatggatacagtgtctctcgacaggcacaggctaaattctctagagtctgccatccccaaccagacagctctttacttctgtgccaccagtggtctcctagtcgacagatacgcagtattttggcccaggcacccggctgacagtgctcggtaagcgggggctcccgctgaagccccggaacgcatgcat

SEQ ID NO: 1344 - DNA, 239 bp, Artificial Sequence
  source: /note="Description of Artificial Sequence: Synthetic polynucleotide"
atgaattctattcctatggagttaattccacagagaagggagatctttcctctgagtcaacagtctccagaataaggacggagcattttcctggagtctgccaggccctcacatacctctcagtacctctgtgccagcagtctgcaatcgtcgacagatacgcagtattttggcccaggcacccggctgacagtgctcggtaagcgggggctcccgctgaagccccggaacgcatgcat

SEQ ID NO: 1345 - DNA, 239 bp, Artificial Sequence
  source: /note="Description of Artificial Sequence: Synthetic polynucleotide"
atgaattctattcaatgaatgttgaggtgactgataagggagatgttcctgaagggtacaaagtctctcgaaaagagaagaggaatttccctggagtcgcccagccccaaccagacctctctgtacttctgtgccagcagttgagcgaagtcgacagatacgcagtattttggcccaggcacccggctgacagtgctcggtaagcgggggctcccgctgaagccccggaacgcatgcat

SEQ ID NO: 1346 - DNA, 239 bp, Artificial Sequence
  source: /note="Description of Artificial Sequence: Synthetic polynucleotide"
atgaattcttctcatatgatgttaaaatgaaagaaaaaggagatattcctgaggggtacagtgtctctagagagaagaaggagcgcttctctggagtccgccagcaccaaccagacatctatgtacctctgtgccagcagtttggactggtcgacagatacgcagtattttggcccaggcacccggctgacagtgctcggtaagcgggggctcccgctgaagccccggaacgcatgcat

SEQ ID NO: 1347 - DNA, 239 bp, Artificial Sequence
  source: /note="Description of Artificial Sequence: Synthetic polynucleotide"
atgaattcgcaaatcagggctctgaggccacatatgagagtggatttgtcattgacaagtttcccatcagccgcccaaacctaacattctactgtgagcaacatgagccctgaagacagcagcatatatctctgcagcgttagcaatccgtcgacagatacgcagtattttggcccaggcacccggctgacagtgctcggtaagcgggggctcccgctgaagccccggaacgcatgcat

SEQ ID NO: 1348 - DNA, 239 bp, Artificial Sequence
  source: /note="Description of Artificial Sequence: Synthetic polynucleotide"
atgaattcctcttctactccgttggtattggccagatcagctctgaggtgccccagaatctctcagcctccagaccccaggaccggcagtagttctaagaagctccttctcagtgactctggcttctatctctgtgcctggcgaactacgtcgacagatacgcagtattttggcccaggcacccggctgacagtgctcggtaagcgggggctcccgctgaagccccggaacgcatgcat

SEQ ID NO: 1349 - DNA, 239 bp, Artificial Sequence
  source: /note="Description of Artificial Sequence: Synthetic polynucleotide"
atgaattcttttataataatgaaatctcagagaagtctgaaatattcgatgatcaattctcagttgaaaggcctgatggatcaaatttcaatccggtccacaaagctggaggactcagccatgtacttctgtgccagcagtcaaggtcagtcgacaaaacattcagtacttcggcgccgggacccggctctcagtgctgggtaagctggggccgccgggggaccggggacggcatgcat

SEQ ID NO: 1350 - DNA, 239 bp, Artificial Sequence
  source: /note="Description of Artificial Sequence: Synthetic polynucleotide"
atgaattcagctacaataataaggagctcattataaatgaaacagttccaaatcgcttctcacctaaatctccagacaaagctcacttaaatcaattccctggagcttggtgactctgctgtgtatttctgtgccagcagctacgtacggtcgacaaaacattcagtacttcggcgccgggacccggctctcagtgctgggtaagctggggccgccgggggaccggggacggcatgcat

SEQ ID NO: 1351 - DNA, 239 bp, Artificial Sequence
  source: /note="Description of Artificial Sequence: Synthetic polynucleotide"
atgaattcgtctacagctatgagaaactctctataaatgaaagtgtgccaagtcgcttctcacctgaatgccccaacagctctctcttaactacacgccctgcagccagaagactcagccctgtatctctgcgccagcagctacgcgttgtcgacaaaacattcagtacttcggcgccgggacccggctctcagtgctgggtaagctggggccgccgggggaccggggacggcatgcat

SEQ ID NO: 1352 - DNA, 239 bp, Artificial Sequence
  source: /note="Description of Artificial Sequence: Synthetic polynucleotide"
atgaattcgtctacaactttaaagaacagactgaaaacaacagtgtgccaagtcgcttctcacctgaatgccccaacagctctcacttatctacacaccctgcagccagaagactcggccctgtatctctgcgccagcagcctcagtgagtcgacaaaacattcagtacttcggcgccgggacccggctctcagtgctgggtaagctggggccgccgggggaccggggacggcatgcat

SEQ ID NO: 1353 - DNA, 239 bp, Artificial Sequence
  source: /note="Description of Artificial Sequence: Synthetic polynucleotide"
atgaattcgtctacagtcttgaagaacgggttgaaaacaacagtgtgccaagtcgcttctcacctgaatgccccaacagctctcacttatctacacaccctgcagccagaagactcggccctgtatctctgcgccagcagcgtgtctacgtcgacaaaacattcagtacttcggcgccgggacccggctctcagtgctgggtaagctggggccgccgggggaccggggacggcatgcat

SEQ ID NO: 1354 - DNA, 239 bp, Artificial Sequence
  source: /note="Description of Artificial Sequence: Synthetic polynucleotide"
atgaattctgaatacttcagtgagacacagagaaacaaaggaaacttccctggtcgattctcagggcgccagttctctaactctcgctcttgtgagcaccttggagctgggggactcggccctttatctttgcgccagcagagtaccgagtcgacaaaacattcagtacttcggcgccgggacccggctctcagtgctgggtaagctggggccgccgggggaccggggacggcatgcat

SEQ ID NO: 1355 - DNA, 239 bp, Artificial Sequence
  source: /note="Description of Artificial Sequence: Synthetic polynucleotide"
atgaattctgaatatgctaatgagttaaggagatcagaaggaaacttccctaatcgattctcagggcgccagttccatgactgttgctcttgtgagtgccttggagctgggggactcggccctgtatctctgtgccagaagttgcctcagtcgacaaaacattcagtacttcggcgccgggacccggctctcagtgctgggtaagctggggccgccgggggaccggggacggcatgcat

SEQ ID NO: 1356 - DNA, 239 bp, Artificial Sequence
  source: /note="Description of Artificial Sequence: Synthetic polynucleotide"
atgaattctcagtattatagggaggaagagaatggcagaggaaacttccctcctagattctcaggtctccagttccctaattatagctcttgtgaacgccttggagctggacgactcggccctgtatctctgtgccagcagtcgttagcgtcgacaaaacattcagtacttcggcgccgggacccggctctcagtgctgggtaagctggggccgccgggggaccggggacggcatgcat

SEQ ID NO: 1357 - DNA, 239 bp, Artificial Sequence
  source: /note="Description of Artificial Sequence: Synthetic polynucleotide"
atgaattctcagtattatgagaaagaagagagaggaagaggaaacttccctgatcgattctcagctcgccagttccctaactatagctcttgtgaacgccttgttgctgggggactcggccctgtatctctgtgccagcagtggacatggtcgacaaaacattcagtacttcggcgccgggacccggctctcagtgctgggtaagctggggccgccgggggaccggggacggcatgcat

SEQ ID NO: 1358 - DNA, 239 bp, Artificial Sequence
  source: /note="Description of Artificial Sequence: Synthetic polynucleotide"
atgaattctcagtattatgaggaggaagagagacagagaggcaacttccctgatcgattctcaggtcaccagttccctaactatagctcttgtgaacgccttgttgctgggggactcggccctctatctctgtgccagcagaggttgctgtcgacaaaacattcagtacttcggcgccgggacccggctctcagtgctgggtaagctggggccgccgggggaccggggacggcatgcat

SEQ ID NO: 1359 - DNA, 239 bp, Artificial Sequence
  source: /note="Description of Artificial Sequence: Synthetic polynucleotide"
atgaattctcagtattatgagaaagaagagagaggaagaggaaacttccctgatcaattctcaggtcaccagttccctaactatagctcttgtgaacgccttgttgctaggggactcggccctctatctctgtgccagcaggtacagtggtcgacaaaacattcagtacttcggcgccgggacccggctctcagtgctgggtaagctggggccgccgggggaccggggacggcatgcat

SEQ ID NO: 1360 - DNA, 239 bp, Artificial Sequence
  source: /note="Description of Artificial Sequence: Synthetic polynucleotide"
atgaattcttggtatgacgagggtgaagagagaaacagaggaaacttccctcctagattttcaggtcgccagttccctaattatagctcttgtgaacgccttggagctggaggactcggccctgtatctctgtgccagcagatccatgggtcgacaaaacattcagtacttcggcgccgggacccggctctcagtgctgggtaagctggggccgccgggggaccggggacggcatgcat

SEQ ID NO: 1361 - DNA, 239 bp, Artificial Sequence
  source: /note="Description of Artificial Sequence: Synthetic polynucleotide"
atgaattctactcagcttctgagggtaccactgacaaaggagaagtccccaatggctacaatgtctccagattaaacaaacgggagttctctggagtcggctgctccctcccagacatctgtgtacttctgtgccagcagttgatgcgagtcgacaaaacattcagtacttcggcgccgggacccggctctcagtgctgggtaagctggggccgccgggggaccggggacggcatgcat

SEQ ID NO: 1362 - DNA, 239 bp, Artificial Sequence
  source: /note="Description of Artificial Sequence: Synthetic polynucleotide"
atgaattctactcagttggtgagggtacaactgccaaaggagaggtccctgatggctacaatgtctccagattaaaaaaacagaatttccttggagtcggctgctccctcccaaacatctgtgtacttctgtgccagcagtgtagcagtgtcgacaaaacattcagtacttcggcgccgggacccggctctcagtgctgggtaagctggggccgccgggggaccggggacggcatgcat

SEQ ID NO: 1363 - DNA, 239 bp, Artificial Sequence
  source: /note="Description of Artificial Sequence: Synthetic polynucleotide"
atgaattctactcagttggtgagggtacaactgccaaaggagaggtccctgatggctacaatgtctccagattaaaaaaacagaatttccttggagtcggctgctccctcccaaacatctgtgtacttctgtgccagcagtggatcatcgtcgacaaaacattcagtacttcggcgccgggacccggctctcagtgctgggtaagctggggccgccgggggaccggggacggcatgcat

SEQ ID NO: 1364 - DNA, 239 bp, Artificial Sequence
  source: /note="Description of Artificial Sequence: Synthetic polynucleotide"
atgaattctattcaaatactgcaggtaccactggcaaaggagaagtccctgatggttatagtgtctccagagcaaacacagatgatttccttggcgtctgctgtaccctctcagacatctgtgtacttctgtgccagcagtgtgaacgtgtcgacaaaacattcagtacttcggcgccgggacccggctctcagtgctgggtaagctggggccgccgggggaccggggacggcatgcat

SEQ ID NO: 1365 - DNA, 239 bp, Artificial Sequence
  source: /note="Description of Artificial Sequence: Synthetic polynucleotide"
atgaattctactcagttggtgctggtatcactgaccaaggagaagtccccaatggctacaatgtctccagatcaaccacagaggatttccctgctgtcggctgctccctcccagacatctgtgtacttctgtgccagcagttgtcatcggtcgacaaaacattcagtacttcggcgccgggacccggctctcagtgctgggtaagctggggccgccgggggaccggggacggcatgcat

SEQ ID NO: 1366 - DNA, 239 bp, Artificial Sequence
  source: /note="Description of Artificial Sequence: Synthetic polynucleotide"
atgaattctattcagttggtgctggtatcactgacaaaggagaagtcccgaatggctacaacgtctccagatcaaccacagaggatttccctggagttggctgctccctcccagacatctgtgtacttctgtgccagcagtaggcttgagtcgacaaaacattcagtacttcggcgccgggacccggctctcagtgctgggtaagctggggccgccgggggaccggggacggcatgcat

SEQ ID NO: 1367 - DNA, 239 bp, Artificial Sequence
  source: /note="Description of Artificial Sequence: Synthetic polynucleotide"
atgaattctactcagttgctgctgctctcactgacaaaggagaagttcccaatggctacaatgtctccagatcaaacacagaggatttccctggagtcagctgctccctctcagacttctgtttacttctgtgccagcagtacacacgtgtcgacaaaacattcagtacttcggcgccgggacccggctctcagtgctgggtaagctggggccgccgggggaccggggacggcatgcat

SEQ ID NO: 1368 - DNA, 239 bp, Artificial Sequence
  source: /note="Description of Artificial Sequence: Synthetic polynucleotide"
atgaattctactactcagctgctgctggtactactgacaaagaagtccccaatggctacaatgtctctagattaaacacagaggatttccctggtgtcggctgctccctcccagacatctgtgtacttgtgtgccagcagttccacagtgtcgacaaaacattcagtacttcggcgccgggacccggctctcagtgctgggtaagctggggccgccgggggaccggggacggcatgcat

SEQ ID NO: 1369 - DNA, 239 bp, Artificial Sequence
  source: /note="Description of Artificial Sequence: Synthetic polynucleotide"
atgaattctactcagttgctgctggtatcactgacaaaggagaagtccccgatggctacaatgtatccagatcaaacacagaggatttccctggagtcagctgctccctcccagacatctgtatacttctgtgccagcagtcagtctgtgtcgacaaaacattcagtacttcggcgccgggacccggctctcagtgctgggtaagctggggccgccgggggaccggggacggcatgcat

SEQ ID NO: 1370 - DNA, 239 bp, Artificial Sequence
  source: /note="Description of Artificial Sequence: Synthetic polynucleotide"
atgaattcttccaaggcaaggatgcagcagacaaatcggggcttccccgtgatcggttctctgcacagaggtctgagggatccatctccattccagcgcacacagcagggggacttggctgtgtatctctgtgccagcagctccatgtggtcgacaaaacattcagtacttcggcgccgggacccggctctcagtgctgggtaagctggggccgccgggggaccggggacggcatgcat

SEQ ID NO: 1371 - DNA, 239 bp, Artificial Sequence
  source: /note="Description of Artificial Sequence: Synthetic polynucleotide"
atgaattcttccaaggcaacagtgcaccagacaaatcagggctgcccagtgatcgcttctctgcagagaggactgggggatccgtctccaatccagcgcacacagcaggaggactcggccgtgtatctctgtgccagcagctcactgcagtcgacaaaacattcagtacttcggcgccgggacccggctctcagtgctgggtaagctggggccgccgggggaccggggacggcatgcat

SEQ ID NO: 1372 - DNA, 239 bp, Artificial Sequence
  source: /note="Description of Artificial Sequence: Synthetic polynucleotide"
atgaattcttccaaggcacgggtgcggcagatgactcagggctgcccaacgatcggttctttgcagtcaggcctgagggatccgtctctaatccagcgcacagagcggggggactcagccgtgtatctctgtgccagcagccaagtcacgtcgacaaaacattcagtacttcggcgccgggacccggctctcagtgctgggtaagctggggccgccgggggaccggggacggcatgcat

SEQ ID NO: 1373 - DNA, 239 bp, Artificial Sequence
  source: /note="Description of Artificial Sequence: Synthetic polynucleotide"
atgaattctcccagagtgatgctcaacgagacaaatcagggcggcccagtggtcggttctctgcagagaggcctgagagatccgtctccaatccagcgcacagagcagggggactcagctgtgtatctctgtgccagcagctagacggagtcgacaaaacattcagtacttcggcgccgggacccggctctcagtgctgggtaagctggggccgccgggggaccggggacggcatgcat

SEQ ID NO: 1374 - DNA, 239 bp, Artificial Sequence
  source: /note="Description of Artificial Sequence: Synthetic polynucleotide"
atgaattcttcaattatgaagcccaacaagacaaatcagggctgcccaatgatcggttctctgcagagaggcctgagggatccatctccaatccagcgcacagagcagcgggactcggccatgtatcgctgtgccagcagcgagcgatagtcgacaaaacattcagtacttcggcgccgggacccggctctcagtgctgggtaagctggggccgccgggggaccggggacggcatgcat

SEQ ID NO: 1375 - DNA, 239 bp, Artificial Sequence
  source: /note="Description of Artificial Sequence: Synthetic polynucleotide"
atgaattcttcaattatgaagctcaaccagacaaatcagggctgcccagtgatcggttctctgcagagaggcctgagggatccatctccaattcagcgcacagagcagcgggactcagccatgtatcgctgtgccagcagcctcgagaagtcgacaaaacattcagtacttcggcgccgggacccggctctcagtgctgggtaagctggggccgccgggggaccggggacggcatgcat

SEQ ID NO: 1376 - DNA, 239 bp, Artificial Sequence
  source: /note="Description of Artificial Sequence: Synthetic polynucleotide"
atgaattcttccagaatgaagctcaactagacaaatcggggctgcccagtgatcgcttctttgcagaaaggcctgagggatccgtctccaatccagcgcacacagcaggaggactccgccgtgtatctctgtgccagcagcatgacaccgtcgacaaaacattcagtacttcggcgccgggacccggctctcagtgctgggtaagctggggccgccgggggaccggggacggcatgcat

SEQ ID NO: 1377 - DNA, 239 bp, Artificial Sequence
  source: /note="Description of Artificial Sequence: Synthetic polynucleotide"
atgaattcttccagaatgaagctcaactagaaaaatcaaggctgctcagtgatcggttctctgcagagaggcctaagggatctttctccaatccagcgcacagagcagggggactcggccatgtatctctgtgccagcagccttcacgagtcgacaaaacattcagtacttcggcgccgggacccggctctcagtgctgggtaagctggggccgccgggggaccggggacggcatgcat

SEQ ID NO: 1378 - DNA, 239 bp, Artificial Sequence
  source: /note="Description of Artificial Sequence: Synthetic polynucleotide"
atgaattctcagtattataatggagaagagagagcaaaaggaaacattcttgaacgattctccgcacaacagttccctgacttgcactctcctgagctctctggagctgggggactcagctttgtatttctgtgccagcagcgtagagtgtcgacaaaacattcagtacttcggcgccgggacccggctctcagtgctgggtaagctggggccgccgggggaccggggacggcatgcat

SEQ ID NO: 1379 - DNA, 239 bp, Artificial Sequence
  source: /note="Description of Artificial Sequence: Synthetic polynucleotide"
atgaattctactcatatggtgttcacgacactaacaaaggagaagtctcagatggctacagtgtctctagatcaaacacagaggacctccctggagtctgctgcctcctcccagacatctgtatatttctgcgccagcagttcgtcgatgtcgacaaaacattcagtacttcggcgccgggacccggctctcagtgctgggtaagctggggccgccgggggaccggggacggcatgcat

SEQ ID NO: 1380 - DNA, 239 bp, Artificial Sequence
  source: /note="Description of Artificial Sequence: Synthetic polynucleotide"
atgaattctactcagcagctgctgatattacagataaaggagaagtccccgatggctatgttgtctccagatccaagacagagaatttccctggagtcagctacccgctcccagacatctgtgtatttctgcgccagcagtagctagtggtcgacaaaacattcagtacttcggcgccgggacccggctctcagtgctgggtaagctggggccgccgggggaccggggacggcatgcat

SEQ ID NO: 1381 - DNA, 239 bp, Artificial Sequence
  source: /note="Description of Artificial Sequence: Synthetic polynucleotide"
atgaattctactcatatggtgttaaagatactgacaaaggagaagtctcagatggctatagtgtctctagatcaaagacagaggatttccctggagtccgctaccagctcccagacatctgtgtacttctgtgccatcagttgagacctgtcgacaaaacattcagtacttcggcgccgggacccggctctcagtgctgggtaagctggggccgccgggggaccggggacggcatgcat

SEQ ID NO: 1382 - DNA, 239 bp, Artificial Sequence
  source: /note="Description of Artificial Sequence: Synthetic polynucleotide"
atgaattctttcaggatgagagtgtagtagatgattcacagttgcctaaggatcgattttctgcagagaggctcaaaggagtagactccaatccagcctgcagagcttggggactcggccatgtatctctgtgccagcagcgatggcttgtcgacaaaacattcagtacttcggcgccgggacccggctctcagtgctgggtaagctggggccgccgggggaccggggacggcatgcat

SEQ ID NO: 1383 - DNA, 239 bp, Artificial Sequence
  source: /note="Description of Artificial Sequence: Synthetic polynucleotide"
atgaattctttcagaataacggtgtagtggatgattcacagttgcctaaggatcgattttctgcagagaggctcaaaggagtagactccaatccagcctgcaaagcttgaggactcggccgtgtatctctgtgccagcagcgcatctgagtcgacaaaacattcagtacttcggcgccgggacccggctctcagtgctgggtaagctggggccgccgggggaccggggacggcatgcat

SEQ ID NO: 1384 - DNA, 239 bp, Artificial Sequence
  source: /note="Description of Artificial Sequence: Synthetic polynucleotide"
atgaattctatgagaatgaggaagcagtagacgattcacagttgcctaaggatcgattttctgcagagaggctcaaaggagtagactccaatccagcctgcagagcttggggactcggccgtgtatctctgtgccagcagcgacactctgtcgacaaaacattcagtacttcggcgccgggacccggctctcagtgctgggtaagctggggccgccgggggaccggggacggcatgcat

SEQ ID NO: 1385 - DNA, 239 bp, Artificial Sequence
  source: /note="Description of Artificial Sequence: Synthetic polynucleotide"
atgaattctttaacaacaacgttccgatagatgattcagggatgcccgaggatcgattctcagctaagatgcctaatgcatcattctccaatccagccctcagaacccagggactcagctgtgtacttctgtgccagcagttgctacacgtcgacaaaacattcagtacttcggcgccgggacccggctctcagtgctgggtaagctggggccgccgggggaccggggacggcatgcat

SEQ ID NO: 1386 - DNA, 239 bp, Artificial Sequence
  source: /note="Description of Artificial Sequence: Synthetic polynucleotide"
atgaattctttaacaacaacgttccgatagatgattcagggatgcccgaggatcgattctcagctaagatgcctaatgcatcattctccaatccagccctcagaacccagggactcagctgtgtacttctgtgccagcagttcagcttggtcgacaaaacattcagtacttcggcgccgggacccggctctcagtgctgggtaagctggggccgccgggggaccggggacggcatgcat

SEQ ID NO: 1387 - DNA, 239 bp, Artificial Sequence
  source: /note="Description of Artificial Sequence: Synthetic polynucleotide"
atgaattcttccgcaaccgggctcctctagatgattcggggatgccgaaggatcgattctcagcagagatgcctgatgcaactttagccaatccagccctcagaacccagggactcagctgtgtatttttgtgctagtggtttcggaacgtcgacaaaacattcagtacttcggcgccgggacccggctctcagtgctgggtaagctggggccgccgggggaccggggacggcatgcat

SEQ ID NO: 1388 - DNA, 239 bp, Artificial Sequence
  source: /note="Description of Artificial Sequence: Synthetic polynucleotide"
atgaattctcgttttatgaaaagatgcagagcgataaaggaagcatccctgatcgattctcagctcaacagttcagtgactatcattctgatgagctccttggagctgggggactcagccctgtacttctgtgccagcagcgcaattcggtcgacaaaacattcagtacttcggcgccgggacccggctctcagtgctgggtaagctggggccgccgggggaccggggacggcatgcat

SEQ ID NO: 1389 - DNA, 239 bp, Artificial Sequence
  source: /note="Description of Artificial Sequence: Synthetic polynucleotide"
atgaattctttgtgaaagagtctaaacaggatgagtccggtatgcccaacaatcgattcttagctgaaaggactggagggacgtattctagtgcagcctgcagaactggaggattctggagtttatttctgtgccagcagccaagaggtgtcgacaaaacattcagtacttcggcgccgggacccggctctcagtgctgggtaagctggggccgccgggggaccggggacggcatgcat

SEQ ID NO: 1390 - DNA, 239 bp, Artificial Sequence
  source: /note="Description of Artificial Sequence: Synthetic polynucleotide"
atgaattccactactatgacaaagattttaacaatgaagcagacacccctgataacttccaatccaggaggccgaacacttctttctgctatccgctcaccaggcctgggggacgcagccatgtacctgtgtgccaccagcgaatggacgtcgacaaaacattcagtacttcggcgccgggacccggctctcagtgctgggtaagctggggccgccgggggaccggggacggcatgcat

SEQ ID NO: 1391 - DNA, 239 bp, Artificial Sequence
  source: /note="Description of Artificial Sequence: Synthetic polynucleotide"
atgaattcttccagaatgaaaatgtctttgatgaaacaggtatgcccaaggaaagattttcagctaagtgcctcccaaattcaccctgtaatccaggctacgaagcttgaggattcagcagtgtatttttgtgccagcagcaactgccagtcgacaaaacattcagtacttcggcgccgggacccggctctcagtgctgggtaagctggggccgccgggggaccggggacggcatgcat

SEQ ID NO: 1392 - DNA, 239 bp, Artificial Sequence
  source: /note="Description of Artificial Sequence: Synthetic polynucleotide"
atgaattctccttccagtaccaaaacattgcagttgattcagggatgcccaaggaacgattcacagctgaaagacctaacggaacgtcttaagatccatcccgcagagccgagggactcagccgtgtatctctacagtagccctagtaggtcgacaaaacattcagtacttcggcgccgggacccggctctcagtgctgggtaagctggggccgccgggggaccggggacggcatgcat

SEQ ID NO: 1393 - DNA, 239 bp, Artificial Sequence
  source: /note="Description of Artificial Sequence: Synthetic polynucleotide"
atgaattcctccagaaagaaaatatcatagatgagtcaggaatgccaaaggaacgattttctgctgaatttcccaaagagggccccagcaatccagcaggtagtgcgaggagattcggcagcttatttctgtgccagctcactgacgttgtcgacaaaacattcagtacttcggcgccgggacccggctctcagtgctgggtaagctggggccgccgggggaccggggacggcatgcat

SEQ ID NO: 1394 - DNA, 239 bp, Artificial Sequence
  source: /note="Description of Artificial Sequence: Synthetic polynucleotide"
atgaattctactcacagatagtaaatgactttcagaaaggagatatagctgaagggtacagcgtctctcgggagaagaaggaatcctttcgtgacatcggcccaaaagaacccgacagctttctatctctgtgccagtagttgcagacagtcgacaaaacattcagtacttcggcgccgggacccggctctcagtgctgggtaagctggggccgccgggggaccggggacggcatgcat

SEQ ID NO: 1395 - DNA, 239 bp, Artificial Sequence
  source: /note="Description of Artificial Sequence: Synthetic polynucleotide"
atgaattctccaatgagggctccaaggccacatacgagcaaggcgtcgagaaggacaagtttctcatcaaccatgcaagcctgaccttgtacagtgaccagtgcccatcctgaagacagcagcttctacatctgcagtgctagttgaccgtcgacaaaacattcagtacttcggcgccgggacccggctctcagtgctgggtaagctggggccgccgggggaccggggacggcatgcat

SEQ ID NO: 1396 - DNA, 239 bp, Artificial Sequence
  source: /note="Description of Artificial Sequence: Synthetic polynucleotide"
atgaattcactcctttgatgtcaaagatataaacaaaggagagatctctgatggatacagtgtctctcgacaggcacaggctaaattctctagagtctgccatccccaaccagacagctctttacttctgtgccaccagtggtctcctagtcgacaaaacattcagtacttcggcgccgggacccggctctcagtgctgggtaagctggggccgccgggggaccggggacggcatgcat

SEQ ID NO: 1397 - DNA, 239 bp, Artificial Sequence
  source: /note="Description of Artificial Sequence: Synthetic polynucleotide"
atgaattctattcctatggagttaattccacagagaagggagatctttcctctgagtcaacagtctccagaataaggacggagcattttcctggagtctgccaggccctcacatacctctcagtacctctgtgccagcagtctgcaatcgtcgacaaaacattcagtacttcggcgccgggacccggctctcagtgctgggtaagctggggccgccgggggaccggggacggcatgcat

SEQ ID NO: 1398 - DNA, 239 bp, Artificial Sequence
  source: /note="Description of Artificial Sequence: Synthetic polynucleotide"
atgaattctattcaatgaatgttgaggtgactgataagggagatgttcctgaagggtacaaagtctctcgaaaagagaagaggaatttccctggagtcgcccagccccaaccagacctctctgtacttctgtgccagcagttgagcgaagtcgacaaaacattcagtacttcggcgccgggacccggctctcagtgctgggtaagctggggccgccgggggaccggggacggcatgcat

SEQ ID NO: 1399 - DNA, 239 bp, Artificial Sequence
  source: /note="Description of Artificial Sequence: Synthetic polynucleotide"
atgaattcttctcatatgatgttaaaatgaaagaaaaaggagatattcctgaggggtacagtgtctctagagagaagaaggagcgcttctctggagtccgccagcaccaaccagacatctatgtacctctgtgccagcagtttggactggtcgacaaaacattcagtacttcggcgccgggacccggctctcagtgctgggtaagctggggccgccgggggaccggggacggcatgcat

SEQ ID NO: 1400 - DNA, 239 bp, Artificial Sequence
  source: /note="Description of Artificial Sequence: Synthetic polynucleotide"
atgaattcgcaaatcagggctctgaggccacatatgagagtggatttgtcattgacaagtttcccatcagccgcccaaacctaacattctactgtgagcaacatgagccctgaagacagcagcatatatctctgcagcgttagcaatccgtcgacaaaacattcagtacttcggcgccgggacccggctctcagtgctgggtaagctggggccgccgggggaccggggacggcatgcat

SEQ ID NO: 1401 - DNA, 239 bp, Artificial Sequence
  source: /note="Description of Artificial Sequence: Synthetic polynucleotide"
atgaattcctcttctactccgttggtattggccagatcagctctgaggtgccccagaatctctcagcctccagaccccaggaccggcagtagttctaagaagctccttctcagtgactctggcttctatctctgtgcctggcgaactacgtcgacaaaacattcagtacttcggcgccgggacccggctctcagtgctgggtaagctggggccgccgggggaccggggacggcatgcat

SEQ ID NO: 1402 - DNA, 239 bp, Artificial Sequence
  source: /note="Description of Artificial Sequence: Synthetic polynucleotide"
atgaattcttttataataatgaaatctcagagaagtctgaaatattcgatgatcaattctcagttgaaaggcctgatggatcaaatttcaatccggtccacaaagctggaggactcagccatgtacttctgtgccagcagtcaaggtcagtcgacgagacccagtacttcgggccaggcacgcggctcctggtgctcggtgagcgcgggctgctggggcgcgggcgcgggcgcatgcat

SEQ ID NO: 1403 - DNA, 239 bp, Artificial Sequence
  source: /note="Description of Artificial Sequence: Synthetic polynucleotide"
atgaattcagctacaataataaggagctcattataaatgaaacagttccaaatcgcttctcacctaaatctccagacaaagctcacttaaatcaattccctggagcttggtgactctgctgtgtatttctgtgccagcagctacgtacggtcgacgagacccagtacttcgggccaggcacgcggctcctggtgctcggtgagcgcgggctgctggggcgcgggcgcgggcgcatgcat

SEQ ID NO: 1404 - DNA, 239 bp, Artificial Sequence
  source: /note="Description of Artificial Sequence: Synthetic polynucleotide"
atgaattcgtctacagctatgagaaactctctataaatgaaagtgtgccaagtcgcttctcacctgaatgccccaacagctctctcttaactacacgccctgcagccagaagactcagccctgtatctctgcgccagcagctacgcgttgtcgacgagacccagtacttcgggccaggcacgcggctcctggtgctcggtgagcgcgggctgctggggcgcgggcgcgggcgcatgcat

SEQ ID NO: 1405 - DNA, 239 bp, Artificial Sequence
  source: /note="Description of Artificial Sequence: Synthetic polynucleotide"
atgaattcgtctacaactttaaagaacagactgaaaacaacagtgtgccaagtcgcttctcacctgaatgccccaacagctctcacttatctacacaccctgcagccagaagactcggccctgtatctctgcgccagcagcctcagtgagtcgacgagacccagtacttcgggccaggcacgcggctcctggtgctcggtgagcgcgggctgctggggcgcgggcgcgggcgcatgcat

SEQ ID NO: 1406 - DNA, 239 bp, Artificial Sequence
  source: /note="Description of Artificial Sequence: Synthetic polynucleotide"
atgaattcgtctacagtcttgaagaacgggttgaaaacaacagtgtgccaagtcgcttctcacctgaatgccccaacagctctcacttatctacacaccctgcagccagaagactcggccctgtatctctgcgccagcagcgtgtctacgtcgacgagacccagtacttcgggccaggcacgcggctcctggtgctcggtgagcgcgggctgctggggcgcgggcgcgggcgcatgcat

SEQ ID NO: 1407 - DNA, 239 bp, Artificial Sequence
  source: /note="Description of Artificial Sequence: Synthetic polynucleotide"
atgaattctgaatacttcagtgagacacagagaaacaaaggaaacttccctggtcgattctcagggcgccagttctctaactctcgctcttgtgagcaccttggagctgggggactcggccctttatctttgcgccagcagagtaccgagtcgacgagacccagtacttcgggccaggcacgcggctcctggtgctcggtgagcgcgggctgctggggcgcgggcgcgggcgcatgcat

SEQ ID NO: 1408 - DNA, 239 bp, Artificial Sequence
  source: /note="Description of Artificial Sequence: Synthetic polynucleotide"
atgaattctgaatatgctaatgagttaaggagatcagaaggaaacttccctaatcgattctcagggcgccagttccatgactgttgctcttgtgagtgccttggagctgggggactcggccctgtatctctgtgccagaagttgcctcagtcgacgagacccagtacttcgggccaggcacgcggctcctggtgctcggtgagcgcgggctgctggggcgcgggcgcgggcgcatgcat

SEQ ID NO: 1409 - DNA, 239 bp, Artificial Sequence
  source: /note="Description of Artificial Sequence: Synthetic polynucleotide"
atgaattctcagtattatagggaggaagagaatggcagaggaaacttccctcctagattctcaggtctccagttccctaattatagctcttgtgaacgccttggagctggacgactcggccctgtatctctgtgccagcagtcgttagcgtcgacgagacccagtacttcgggccaggcacgcggctcctggtgctcggtgagcgcgggctgctggggcgcgggcgcgggcgcatgcat

SEQ ID NO: 1410 - DNA, 239 bp, Artificial Sequence
  source: /note="Description of Artificial Sequence: Synthetic polynucleotide"
atgaattctcagtattatgagaaagaagagagaggaagaggaaacttccctgatcgattctcagctcgccagttccctaactatagctcttgtgaacgccttgttgctgggggactcggccctgtatctctgtgccagcagtggacatggtcgacgagacccagtacttcgggccaggcacgcggctcctggtgctcggtgagcgcgggctgctggggcgcgggcgcgggcgcatgcat

SEQ ID NO: 1411 - DNA, 239 bp, Artificial Sequence
  source: /note="Description of Artificial Sequence: Synthetic polynucleotide"
atgaattctcagtattatgaggaggaagagagacagagaggcaacttccctgatcgattctcaggtcaccagttccctaactatagctcttgtgaacgccttgttgctgggggactcggccctctatctctgtgccagcagaggttgctgtcgacgagacccagtacttcgggccaggcacgcggctcctggtgctcggtgagcgcgggctgctggggcgcgggcgcgggcgcatgcat

SEQ ID NO: 1412 - DNA, 239 bp, Artificial Sequence
  source: /note="Description of Artificial Sequence: Synthetic polynucleotide"
atgaattctcagtattatgagaaagaagagagaggaagaggaaacttccctgatcaattctcaggtcaccagttccctaactatagctcttgtgaacgccttgttgctaggggactcggccctctatctctgtgccagcaggtacagtggtcgacgagacccagtacttcgggccaggcacgcggctcctggtgctcggtgagcgcgggctgctggggcgcgggcgcgggcgcatgcat

SEQ ID NO: 1413 - DNA, 239 bp, Artificial Sequence
  source: /note="Description of Artificial Sequence: Synthetic polynucleotide"
atgaattcttggtatgacgagggtgaagagagaaacagaggaaacttccctcctagattttcaggtcgccagttccctaattatagctcttgtgaacgccttggagctggaggactcggccctgtatctctgtgccagcagatccatgggtcgacgagacccagtacttcgggccaggcacgcggctcctggtgctcggtgagcgcgggctgctggggcgcgggcgcgggcgcatgcat

SEQ ID NO: 1414 - DNA, 239 bp, Artificial Sequence
  source: /note="Description of Artificial Sequence: Synthetic polynucleotide"
atgaattctactcagcttctgagggtaccactgacaaaggagaagtccccaatggctacaatgtctccagattaaacaaacgggagttctctggagtcggctgctccctcccagacatctgtgtacttctgtgccagcagttgatgcgagtcgacgagacccagtacttcgggccaggcacgcggctcctggtgctcggtgagcgcgggctgctggggcgcgggcgcgggcgcatgcat

SEQ ID NO: 1415 - DNA, 239 bp, Artificial Sequence
  source: /note="Description of Artificial Sequence: Synthetic polynucleotide"
atgaattctactcagttggtgagggtacaactgccaaaggagaggtccctgatggctacaatgtctccagattaaaaaaacagaatttccttggagtcggctgctccctcccaaacatctgtgtacttctgtgccagcagtgtagcagtgtcgacgagacccagtacttcgggccaggcacgcggctcctggtgctcggtgagcgcgggctgctggggcgcgggcgcgggcgcatgcat

SEQ ID NO: 1416 - DNA, 239 bp, Artificial Sequence
  source: /note="Description of Artificial Sequence: Synthetic polynucleotide"
atgaattctactcagttggtgagggtacaactgccaaaggagaggtccctgatggctacaatgtctccagattaaaaaaacagaatttccttggagtcggctgctccctcccaaacatctgtgtacttctgtgccagcagtggatcatcgtcgacgagacccagtacttcgggccaggcacgcggctcctggtgctcggtgagcgcgggctgctggggcgcgggcgcgggcgcatgcat

SEQ ID NO: 1417 - DNA, 239 bp, Artificial Sequence
  source: /note="Description of Artificial Sequence: Synthetic polynucleotide"
atgaattctattcaaatactgcaggtaccactggcaaaggagaagtccctgatggttatagtgtctccagagcaaacacagatgatttccttggcgtctgctgtaccctctcagacatctgtgtacttctgtgccagcagtgtgaacgtgtcgacgagacccagtacttcgggccaggcacgcggctcctggtgctcggtgagcgcgggctgctggggcgcgggcgcgggcgcatgcat

SEQ ID NO: 1418 - DNA, 239 bp, Artificial Sequence
  source: /note="Description of Artificial Sequence: Synthetic polynucleotide"
atgaattctactcagttggtgctggtatcactgaccaaggagaagtccccaatggctacaatgtctccagatcaaccacagaggatttccctgctgtcggctgctccctcccagacatctgtgtacttctgtgccagcagttgtcatcggtcgacgagacccagtacttcgggccaggcacgcggctcctggtgctcggtgagcgcgggctgctggggcgcgggcgcgggcgcatgcat

SEQ ID NO: 1419 - DNA, 239 bp, Artificial Sequence
  source: /note="Description of Artificial Sequence: Synthetic polynucleotide"
atgaattctattcagttggtgctggtatcactgacaaaggagaagtcccgaatggctacaacgtctccagatcaaccacagaggatttccctggagttggctgctccctcccagacatctgtgtacttctgtgccagcagtaggcttgagtcgacgagacccagtacttcgggccaggcacgcggctcctggtgctcggtgagcgcgggctgctggggcgcgggcgcgggcgcatgcat

SEQ ID NO: 1420 - DNA, 239 bp, Artificial Sequence
  source: /note="Description of Artificial Sequence: Synthetic polynucleotide"
atgaattctactcagttgctgctgctctcactgacaaaggagaagttcccaatggctacaatgtctccagatcaaacacagaggatttccctggagtcagctgctccctctcagacttctgtttacttctgtgccagcagtacacacgtgtcgacgagacccagtacttcgggccaggcacgcggctcctggtgctcggtgagcgcgggctgctggggcgcgggcgcgggcgcatgcat

SEQ ID NO: 1421 - DNA, 239 bp, Artificial Sequence
  source: /note="Description of Artificial Sequence: Synthetic polynucleotide"
atgaattctactactcagctgctgctggtactactgacaaagaagtccccaatggctacaatgtctctagattaaacacagaggatttccctggtgtcggctgctccctcccagacatctgtgtacttgtgtgccagcagttccacagtgtcgacgagacccagtacttcgggccaggcacgcggctcctggtgctcggtgagcgcgggctgctggggcgcgggcgcgggcgcatgcat

SEQ ID NO: 1422 - DNA, 239 bp, Artificial Sequence
  source: /note="Description of Artificial Sequence: Synthetic polynucleotide"
atgaattctactcagttgctgctggtatcactgacaaaggagaagtccccgatggctacaatgtatccagatcaaacacagaggatttccctggagtcagctgctccctcccagacatctgtatacttctgtgccagcagtcagtctgtgtcgacgagacccagtacttcgggccaggcacgcggctcctggtgctcggtgagcgcgggctgctggggcgcgggcgcgggcgcatgcat

SEQ ID NO: 1423 - DNA, 239 bp, Artificial Sequence
  source: /note="Description of Artificial Sequence: Synthetic polynucleotide"
atgaattcttccaaggcaaggatgcagcagacaaatcggggcttccccgtgatcggttctctgcacagaggtctgagggatccatctccattccagcgcacacagcagggggacttggctgtgtatctctgtgccagcagctccatgtggtcgacgagacccagtacttcgggccaggcacgcggctcctggtgctcggtgagcgcgggctgctggggcgcgggcgcgggcgcatgcat

SEQ ID NO: 1424 - DNA, 239 bp, Artificial Sequence
  source: /note="Description of Artificial Sequence: Synthetic polynucleotide"
atgaattcttccaaggcaacagtgcaccagacaaatcagggctgcccagtgatcgcttctctgcagagaggactgggggatccgtctccaatccagcgcacacagcaggaggactcggccgtgtatctctgtgccagcagctcactgcagtcgacgagacccagtacttcgggccaggcacgcggctcctggtgctcggtgagcgcgggctgctggggcgcgggcgcgggcgcatgcat

SEQ ID NO: 1425 - DNA, 239 bp, Artificial Sequence
  source: /note="Description of Artificial Sequence: Synthetic polynucleotide"
atgaattcttccaaggcacgggtgcggcagatgactcagggctgcccaacgatcggttctttgcagtcaggcctgagggatccgtctctaatccagcgcacagagcggggggactcagccgtgtatctctgtgccagcagccaagtcacgtcgacgagacccagtacttcgggccaggcacgcggctcctggtgctcggtgagcgcgggctgctggggcgcgggcgcgggcgcatgcat

SEQ ID NO: 1426 - DNA, 239 bp, Artificial Sequence
  source: /note="Description of Artificial Sequence: Synthetic polynucleotide"
atgaattctcccagagtgatgctcaacgagacaaatcagggcggcccagtggtcggttctctgcagagaggcctgagagatccgtctccaatccagcgcacagagcagggggactcagctgtgtatctctgtgccagcagctagacggagtcgacgagacccagtacttcgggccaggcacgcggctcctggtgctcggtgagcgcgggctgctggggcgcgggcgcgggcgcatgcat

SEQ ID NO: 1427 - DNA, 239 bp, Artificial Sequence
  source: /note="Description of Artificial Sequence: Synthetic polynucleotide"
atgaattcttcaattatgaagcccaacaagacaaatcagggctgcccaatgatcggttctctgcagagaggcctgagggatccatctccaatccagcgcacagagcagcgggactcggccatgtatcgctgtgccagcagcgagcgatagtcgacgagacccagtacttcgggccaggcacgcggctcctggtgctcggtgagcgcgggctgctggggcgcgggcgcgggcgcatgcat

SEQ ID NO: 1428 - DNA, 239 bp, Artificial Sequence
  source: /note="Description of Artificial Sequence: Synthetic polynucleotide"
atgaattcttcaattatgaagctcaaccagacaaatcagggctgcccagtgatcggttctctgcagagaggcctgagggatccatctccaattcagcgcacagagcagcgggactcagccatgtatcgctgtgccagcagcctcgagaagtcgacgagacccagtacttcgggccaggcacgcggctcctggtgctcggtgagcgcgggctgctggggcgcgggcgcgggcgcatgcat

SEQ ID NO: 1429 - DNA, 239 bp, Artificial Sequence
  source: /note="Description of Artificial Sequence: Synthetic polynucleotide"
atgaattcttccagaatgaagctcaactagacaaatcggggctgcccagtgatcgcttctttgcagaaaggcctgagggatccgtctccaatccagcgcacacagcaggaggactccgccgtgtatctctgtgccagcagcatgacaccgtcgacgagacccagtacttcgggccaggcacgcggctcctggtgctcggtgagcgcgggctgctggggcgcgggcgcgggcgcatgcat

SEQ ID NO: 1430 - DNA, 239 bp, Artificial Sequence
  source: /note="Description of Artificial Sequence: Synthetic polynucleotide"
atgaattcttccagaatgaagctcaactagaaaaatcaaggctgctcagtgatcggttctctgcagagaggcctaagggatctttctccaatccagcgcacagagcagggggactcggccatgtatctctgtgccagcagccttcacgagtcgacgagacccagtacttcgggccaggcacgcggctcctggtgctcggtgagcgcgggctgctggggcgcgggcgcgggcgcatgcat

SEQ ID NO: 1431 - DNA, 239 bp, Artificial Sequence
  source: /note="Description of Artificial Sequence: Synthetic polynucleotide"
atgaattctcagtattataatggagaagagagagcaaaaggaaacattcttgaacgattctccgcacaacagttccctgacttgcactctcctgagctctctggagctgggggactcagctttgtatttctgtgccagcagcgtagagtgtcgacgagacccagtacttcgggccaggcacgcggctcctggtgctcggtgagcgcgggctgctggggcgcgggcgcgggcgcatgcat

SEQ ID NO: 1432 - DNA, 239 bp, Artificial Sequence
  source: /note="Description of Artificial Sequence: Synthetic polynucleotide"
atgaattctactcatatggtgttcacgacactaacaaaggagaagtctcagatggctacagtgtctctagatcaaacacagaggacctccctggagtctgctgcctcctcccagacatctgtatatttctgcgccagcagttcgtcgatgtcgacgagacccagtacttcgggccaggcacgcggctcctggtgctcggtgagcgcgggctgctggggcgcgggcgcgggcgcatgcat

SEQ ID NO: 1433 - DNA, 239 bp, Artificial Sequence
  source: /note="Description of Artificial Sequence: Synthetic polynucleotide"
atgaattctactcagcagctgctgatattacagataaaggagaagtccccgatggctatgttgtctccagatccaagacagagaatttccctggagtcagctacccgctcccagacatctgtgtatttctgcgccagcagtagctagtggtcgacgagacccagtacttcgggccaggcacgcggctcctggtgctcggtgagcgcgggctgctggggcgcgggcgcgggcgcatgcat

SEQ ID NO: 1434 - DNA, 239 bp, Artificial Sequence
  source: /note="Description of Artificial Sequence: Synthetic polynucleotide"
atgaattctactcatatggtgttaaagatactgacaaaggagaagtctcagatggctatagtgtctctagatcaaagacagaggatttccctggagtccgctaccagctcccagacatctgtgtacttctgtgccatcagttgagacctgtcgacgagacccagtacttcgggccaggcacgcggctcctggtgctcggtgagcgcgggctgctggggcgcgggcgcgggcgcatgcat

SEQ ID NO: 1435 - DNA, 239 bp, Artificial Sequence
  source: /note="Description of Artificial Sequence: Synthetic polynucleotide"
atgaattctttcaggatgagagtgtagtagatgattcacagttgcctaaggatcgattttctgcagagaggctcaaaggagtagactccaatccagcctgcagagcttggggactcggccatgtatctctgtgccagcagcgatggcttgtcgacgagacccagtacttcgggccaggcacgcggctcctggtgctcggtgagcgcgggctgctggggcgcgggcgcgggcgcatgcat

SEQ ID NO: 1436 - DNA, 239 bp, Artificial Sequence
  source: /note="Description of Artificial Sequence: Synthetic polynucleotide"
atgaattctttcagaataacggtgtagtggatgattcacagttgcctaaggatcgattttctgcagagaggctcaaaggagtagactccaatccagcctgcaaagcttgaggactcggccgtgtatctctgtgccagcagcgcatctgagtcgacgagacccagtacttcgggccaggcacgcggctcctggtgctcggtgagcgcgggctgctggggcgcgggcgcgggcgcatgcat

SEQ ID NO: 1437 - DNA, 239 bp, Artificial Sequence
  source: /note="Description of Artificial Sequence: Synthetic polynucleotide"
atgaattctatgagaatgaggaagcagtagacgattcacagttgcctaaggatcgattttctgcagagaggctcaaaggagtagactccaatccagcctgcagagcttggggactcggccgtgtatctctgtgccagcagcgacactctgtcgacgagacccagtacttcgggccaggcacgcggctcctggtgctcggtgagcgcgggctgctggggcgcgggcgcgggcgcatgcat

SEQ ID NO: 1438 - DNA, 239 bp, Artificial Sequence
  source: /note="Description of Artificial Sequence: Synthetic polynucleotide"
atgaattctttaacaacaacgttccgatagatgattcagggatgcccgaggatcgattctcagctaagatgcctaatgcatcattctccaatccagccctcagaacccagggactcagctgtgtacttctgtgccagcagttgctacacgtcgacgagacccagtacttcgggccaggcacgcggctcctggtgctcggtgagcgcgggctgctggggcgcgggcgcgggcgcatgcat

SEQ ID NO: 1439 - DNA, 239 bp, Artificial Sequence
  source: /note="Description of Artificial Sequence: Synthetic polynucleotide"
atgaattctttaacaacaacgttccgatagatgattcagggatgcccgaggatcgattctcagctaagatgcctaatgcatcattctccaatccagccctcagaacccagggactcagctgtgtacttctgtgccagcagttcagcttggtcgacgagacccagtacttcgggccaggcacgcggctcctggtgctcggtgagcgcgggctgctggggcgcgggcgcgggcgcatgcat

SEQ ID NO: 1440 - DNA, 239 bp, Artificial Sequence
  source: /note="Description of Artificial Sequence: Synthetic polynucleotide"
atgaattcttccgcaaccgggctcctctagatgattcggggatgccgaaggatcgattctcagcagagatgcctgatgcaactttagccaatccagccctcagaacccagggactcagctgtgtatttttgtgctagtggtttcggaacgtcgacgagacccagtacttcgggccaggcacgcggctcctggtgctcggtgagcgcgggctgctggggcgcgggcgcgggcgcatgcat

SEQ ID NO: 1441 - DNA, 239 bp, Artificial Sequence
  source: /note="Description of Artificial Sequence: Synthetic polynucleotide"
atgaattctcgttttatgaaaagatgcagagcgataaaggaagcatccctgatcgattctcagctcaacagttcagtgactatcattctgatgagctccttggagctgggggactcagccctgtacttctgtgccagcagcgcaattcggtcgacgagacccagtacttcgggccaggcacgcggctcctggtgctcggtgagcgcgggctgctggggcgcgggcgcgggcgcatgcat

SEQ ID NO: 1442 - DNA, 239 bp, Artificial Sequence
  source: /note="Description of Artificial Sequence: Synthetic polynucleotide"
atgaattctttgtgaaagagtctaaacaggatgagtccggtatgcccaacaatcgattcttagctgaaaggactggagggacgtattctagtgcagcctgcagaactggaggattctggagtttatttctgtgccagcagccaagaggtgtcgacgagacccagtacttcgggccaggcacgcggctcctggtgctcggtgagcgcgggctgctggggcgcgggcgcgggcgcatgcat

SEQ ID NO: 1443 - DNA, 239 bp, Artificial Sequence
  source: /note="Description of Artificial Sequence: Synthetic polynucleotide"
atgaattccactactatgacaaagattttaacaatgaagcagacacccctgataacttccaatccaggaggccgaacacttctttctgctatccgctcaccaggcctgggggacgcagccatgtacctgtgtgccaccagcgaatggacgtcgacgagacccagtacttcgggccaggcacgcggctcctggtgctcggtgagcgcgggctgctggggcgcgggcgcgggcgcatgcat

SEQ ID NO: 1444 - DNA, 239 bp, Artificial Sequence
  source: /note="Description of Artificial Sequence: Synthetic polynucleotide"
atgaattcttccagaatgaaaatgtctttgatgaaacaggtatgcccaaggaaagattttcagctaagtgcctcccaaattcaccctgtaatccaggctacgaagcttgaggattcagcagtgtatttttgtgccagcagcaactgccagtcgacgagacccagtacttcgggccaggcacgcggctcctggtgctcggtgagcgcgggctgctggggcgcgggcgcgggcgcatgcat

SEQ ID NO: 1445 - DNA, 239 bp, Artificial Sequence
  source: /note="Description of Artificial Sequence: Synthetic polynucleotide"
atgaattctccttccagtaccaaaacattgcagttgattcagggatgcccaaggaacgattcacagctgaaagacctaacggaacgtcttaagatccatcccgcagagccgagggactcagccgtgtatctctacagtagccctagtaggtcgacgagacccagtacttcgggccaggcacgcggctcctggtgctcggtgagcgcgggctgctggggcgcgggcgcgggcgcatgcat

SEQ ID NO: 1446 - DNA, 239 bp, Artificial Sequence
  source: /note="Description of Artificial Sequence: Synthetic polynucleotide"
atgaattcctccagaaagaaaatatcatagatgagtcaggaatgccaaaggaacgattttctgctgaatttcccaaagagggccccagcaatccagcaggtagtgcgaggagattcggcagcttatttctgtgccagctcactgacgttgtcgacgagacccagtacttcgggccaggcacgcggctcctggtgctcggtgagcgcgggctgctggggcgcgggcgcgggcgcatgcat

SEQ ID NO: 1447 - DNA, 239 bp, Artificial Sequence
  source: /note="Description of Artificial Sequence: Synthetic polynucleotide"
atgaattctactcacagatagtaaatgactttcagaaaggagatatagctgaagggtacagcgtctctcgggagaagaaggaatcctttcgtgacatcggcccaaaagaacccgacagctttctatctctgtgccagtagttgcagacagtcgacgagacccagtacttcgggccaggcacgcggctcctggtgctcggtgagcgcgggctgctggggcgcgggcgcgggcgcatgcat

SEQ ID NO: 1448 - DNA, 239 bp, Artificial Sequence
  source: /note="Description of Artificial Sequence: Synthetic polynucleotide"
atgaattctccaatgagggctccaaggccacatacgagcaaggcgtcgagaaggacaagtttctcatcaaccatgcaagcctgaccttgtacagtgaccagtgcccatcctgaagacagcagcttctacatctgcagtgctagttgaccgtcgacgagacccagtacttcgggccaggcacgcggctcctggtgctcggtgagcgcgggctgctggggcgcgggcgcgggcgcatgcat

SEQ ID NO: 1449 - DNA, 239 bp, Artificial Sequence
  source: /note="Description of Artificial Sequence: Synthetic polynucleotide"
atgaattcactcctttgatgtcaaagatataaacaaaggagagatctctgatggatacagtgtctctcgacaggcacaggctaaattctctagagtctgccatccccaaccagacagctctttacttctgtgccaccagtggtctcctagtcgacgagacccagtacttcgggccaggcacgcggctcctggtgctcggtgagcgcgggctgctggggcgcgggcgcgggcgcatgcat

SEQ ID NO: 1450 - DNA, 239 bp, Artificial Sequence
  source: /note="Description of Artificial Sequence: Synthetic polynucleotide"
atgaattctattcctatggagttaattccacagagaagggagatctttcctctgagtcaacagtctccagaataaggacggagcattttcctggagtctgccaggccctcacatacctctcagtacctctgtgccagcagtctgcaatcgtcgacgagacccagtacttcgggccaggcacgcggctcctggtgctcggtgagcgcgggctgctggggcgcgggcgcgggcgcatgcat

SEQ ID NO: 1451 - DNA, 239 bp, Artificial Sequence
  source: /note="Description of Artificial Sequence: Synthetic polynucleotide"
atgaattctattcaatgaatgttgaggtgactgataagggagatgttcctgaagggtacaaagtctctcgaaaagagaagaggaatttccctggagtcgcccagccccaaccagacctctctgtacttctgtgccagcagttgagcgaagtcgacgagacccagtacttcgggccaggcacgcggctcctggtgctcggtgagcgcgggctgctggggcgcgggcgcgggcgcatgcat

SEQ ID NO: 1452 - DNA, 239 bp, Artificial Sequence
  source: /note="Description of Artificial Sequence: Synthetic polynucleotide"
atgaattcttctcatatgatgttaaaatgaaagaaaaaggagatattcctgaggggtacagtgtctctagagagaagaaggagcgcttctctggagtccgccagcaccaaccagacatctatgtacctctgtgccagcagtttggactggtcgacgagacccagtacttcgggccaggcacgcggctcctggtgctcggtgagcgcgggctgctggggcgcgggcgcgggcgcatgcat

SEQ ID NO: 1453 - DNA, 239 bp, Artificial Sequence
  source: /note="Description of Artificial Sequence: Synthetic polynucleotide"
atgaattcgcaaatcagggctctgaggccacatatgagagtggatttgtcattgacaagtttcccatcagccgcccaaacctaacattctactgtgagcaacatgagccctgaagacagcagcatatatctctgcagcgttagcaatccgtcgacgagacccagtacttcgggccaggcacgcggctcctggtgctcggtgagcgcgggctgctggggcgcgggcgcgggcgcatgcat

SEQ ID NO: 1454 - DNA, 239 bp, Artificial Sequence
  source: /note="Description of Artificial Sequence: Synthetic polynucleotide"
atgaattcctcttctactccgttggtattggccagatcagctctgaggtgccccagaatctctcagcctccagaccccaggaccggcagtagttctaagaagctccttctcagtgactctggcttctatctctgtgcctggcgaactacgtcgacgagacccagtacttcgggccaggcacgcggctcctggtgctcggtgagcgcgggctgctggggcgcgggcgcgggcgcatgcat

SEQ ID NO: 1455 - DNA, 239 bp, Artificial Sequence
  source: /note="Description of Artificial Sequence: Synthetic polynucleotide"
atgaattcttttataataatgaaatctcagagaagtctgaaatattcgatgatcaattctcagttgaaaggcctgatggatcaaatttcaatccggtccacaaagctggaggactcagccatgtacttctgtgccagcagtcaaggtcagtcgacgggccaacgtcctgactttcggggccggcagcaggctgaccgtgctgggtgagttttcgcgggaccacccgggcgggcatgcat

SEQ ID NO: 1456 - DNA, 239 bp, Artificial Sequence
  source: /note="Description of Artificial Sequence: Synthetic polynucleotide"
atgaattcagctacaataataaggagctcattataaatgaaacagttccaaatcgcttctcacctaaatctccagacaaagctcacttaaatcaattccctggagcttggtgactctgctgtgtatttctgtgccagcagctacgtacggtcgacgggccaacgtcctgactttcggggccggcagcaggctgaccgtgctgggtgagttttcgcgggaccacccgggcgggcatgcat

SEQ ID NO: 1457 - DNA, 239 bp, Artificial Sequence
  source: /note="Description of Artificial Sequence: Synthetic polynucleotide"
atgaattcgtctacagctatgagaaactctctataaatgaaagtgtgccaagtcgcttctcacctgaatgccccaacagctctctcttaactacacgccctgcagccagaagactcagccctgtatctctgcgccagcagctacgcgttgtcgacgggccaacgtcctgactttcggggccggcagcaggctgaccgtgctgggtgagttttcgcgggaccacccgggcgggcatgcat

SEQ ID NO: 1458 - DNA, 239 bp, Artificial Sequence
  source: /note="Description of Artificial Sequence: Synthetic polynucleotide"
atgaattcgtctacaactttaaagaacagactgaaaacaacagtgtgccaagtcgcttctcacctgaatgccccaacagctctcacttatctacacaccctgcagccagaagactcggccctgtatctctgcgccagcagcctcagtgagtcgacgggccaacgtcctgactttcggggccggcagcaggctgaccgtgctgggtgagttttcgcgggaccacccgggcgggcatgcat

SEQ ID NO: 1459 - DNA, 239 bp, Artificial Sequence
  source: /note="Description of Artificial Sequence: Synthetic polynucleotide"
atgaattcgtctacagtcttgaagaacgggttgaaaacaacagtgtgccaagtcgcttctcacctgaatgccccaacagctctcacttatctacacaccctgcagccagaagactcggccctgtatctctgcgccagcagcgtgtctacgtcgacgggccaacgtcctgactttcggggccggcagcaggctgaccgtgctgggtgagttttcgcgggaccacccgggcgggcatgcat

SEQ ID NO: 1460 - DNA, 239 bp, Artificial Sequence
  source: /note="Description of Artificial Sequence: Synthetic polynucleotide"
atgaattctgaatacttcagtgagacacagagaaacaaaggaaacttccctggtcgattctcagggcgccagttctctaactctcgctcttgtgagcaccttggagctgggggactcggccctttatctttgcgccagcagagtaccgagtcgacgggccaacgtcctgactttcggggccggcagcaggctgaccgtgctgggtgagttttcgcgggaccacccgggcgggcatgcat

SEQ ID NO: 1461 - DNA, 239 bp, Artificial Sequence
  source: /note="Description of Artificial Sequence: Synthetic polynucleotide"
atgaattctgaatatgctaatgagttaaggagatcagaaggaaacttccctaatcgattctcagggcgccagttccatgactgttgctcttgtgagtgccttggagctgggggactcggccctgtatctctgtgccagaagttgcctcagtcgacgggccaacgtcctgactttcggggccggcagcaggctgaccgtgctgggtgagttttcgcgggaccacccgggcgggcatgcat

SEQ ID NO: 1462 - DNA, 239 bp, Artificial Sequence
  source: /note="Description of Artificial Sequence: Synthetic polynucleotide"
atgaattctcagtattatagggaggaagagaatggcagaggaaacttccctcctagattctcaggtctccagttccctaattatagctcttgtgaacgccttggagctggacgactcggccctgtatctctgtgccagcagtcgttagcgtcgacgggccaacgtcctgactttcggggccggcagcaggctgaccgtgctgggtgagttttcgcgggaccacccgggcgggcatgcat

SEQ ID NO: 1463 - DNA, 239 bp, Artificial Sequence
  source: /note="Description of Artificial Sequence: Synthetic polynucleotide"
atgaattctcagtattatgagaaagaagagagaggaagaggaaacttccctgatcgattctcagctcgccagttccctaactatagctcttgtgaacgccttgttgctgggggactcggccctgtatctctgtgccagcagtggacatggtcgacgggccaacgtcctgactttcggggccggcagcaggctgaccgtgctgggtgagttttcgcgggaccacccgggcgggcatgcat

SEQ ID NO: 1464 - DNA, 239 bp, Artificial Sequence
  source: /note="Description of Artificial Sequence: Synthetic polynucleotide"
atgaattctcagtattatgaggaggaagagagacagagaggcaacttccctgatcgattctcaggtcaccagttccctaactatagctcttgtgaacgccttgttgctgggggactcggccctctatctctgtgccagcagaggttgctgtcgacgggccaacgtcctgactttcggggccggcagcaggctgaccgtgctgggtgagttttcgcgggaccacccgggcgggcatgcat

SEQ ID NO: 1465 - DNA, 239 bp, Artificial Sequence
  source: /note="Description of Artificial Sequence: Synthetic polynucleotide"
atgaattctcagtattatgagaaagaagagagaggaagaggaaacttccctgatcaattctcaggtcaccagttccctaactatagctcttgtgaacgccttgttgctaggggactcggccctctatctctgtgccagcaggtacagtggtcgacgggccaacgtcctgactttcggggccggcagcaggctgaccgtgctgggtgagttttcgcgggaccacccgggcgggcatgcat

SEQ ID NO: 1466 - DNA, 239 bp, Artificial Sequence
  source: /note="Description of Artificial Sequence: Synthetic polynucleotide"
atgaattcttggtatgacgagggtgaagagagaaacagaggaaacttccctcctagattttcaggtcgccagttccctaattatagctcttgtgaacgccttggagctggaggactcggccctgtatctctgtgccagcagatccatgggtcgacgggccaacgtcctgactttcggggccggcagcaggctgaccgtgctgggtgagttttcgcgggaccacccgggcgggcatgcat

SEQ ID NO: 1467 - DNA, 239 bp, Artificial Sequence
  source: /note="Description of Artificial Sequence: Synthetic polynucleotide"
atgaattctactcagcttctgagggtaccactgacaaaggagaagtccccaatggctacaatgtctccagattaaacaaacgggagttctctggagtcggctgctccctcccagacatctgtgtacttctgtgccagcagttgatgcgagtcgacgggccaacgtcctgactttcggggccggcagcaggctgaccgtgctgggtgagttttcgcgggaccacccgggcgggcatgcat

SEQ ID NO: 1468 - DNA, 239 bp, Artificial Sequence
  source: /note="Description of Artificial Sequence: Synthetic polynucleotide"
atgaattctactcagttggtgagggtacaactgccaaaggagaggtccctgatggctacaatgtctccagattaaaaaaacagaatttccttggagtcggctgctccctcccaaacatctgtgtacttctgtgccagcagtgtagcagtgtcgacgggccaacgtcctgactttcggggccggcagcaggctgaccgtgctgggtgagttttcgcgggaccacccgggcgggcatgcat

SEQ ID NO: 1469 - DNA, 239 bp, Artificial Sequence
  source: /note="Description of Artificial Sequence: Synthetic polynucleotide"
atgaattctactcagttggtgagggtacaactgccaaaggagaggtccctgatggctacaatgtctccagattaaaaaaacagaatttccttggagtcggctgctccctcccaaacatctgtgtacttctgtgccagcagtggatcatcgtcgacgggccaacgtcctgactttcggggccggcagcaggctgaccgtgctgggtgagttttcgcgggaccacccgggcgggcatgcat

SEQ ID NO: 1470 - DNA, 239 bp, Artificial Sequence
  source: /note="Description of Artificial Sequence: Synthetic polynucleotide"
atgaattctattcaaatactgcaggtaccactggcaaaggagaagtccctgatggttatagtgtctccagagcaaacacagatgatttccttggcgtctgctgtaccctctcagacatctgtgtacttctgtgccagcagtgtgaacgtgtcgacgggccaacgtcctgactttcggggccggcagcaggctgaccgtgctgggtgagttttcgcgggaccacccgggcgggcatgcat

SEQ ID NO: 1471 - DNA, 239 bp, Artificial Sequence
  source: /note="Description of Artificial Sequence: Synthetic polynucleotide"
atgaattctactcagttggtgctggtatcactgaccaaggagaagtccccaatggctacaatgtctccagatcaaccacagaggatttccctgctgtcggctgctccctcccagacatctgtgtacttctgtgccagcagttgtcatcggtcgacgggccaacgtcctgactttcggggccggcagcaggctgaccgtgctgggtgagttttcgcgggaccacccgggcgggcatgcat

SEQ ID NO: 1472 - DNA, 239 bp, Artificial Sequence
  source: /note="Description of Artificial Sequence: Synthetic polynucleotide"
atgaattctattcagttggtgctggtatcactgacaaaggagaagtcccgaatggctacaacgtctccagatcaaccacagaggatttccctggagttggctgctccctcccagacatctgtgtacttctgtgccagcagtaggcttgagtcgacgggccaacgtcctgactttcggggccggcagcaggctgaccgtgctgggtgagttttcgcgggaccacccgggcgggcatgcat

SEQ ID NO: 1473 - DNA, 239 bp, Artificial Sequence
  source: /note="Description of Artificial Sequence: Synthetic polynucleotide"
atgaattctactcagttgctgctgctctcactgacaaaggagaagttcccaatggctacaatgtctccagatcaaacacagaggatttccctggagtcagctgctccctctcagacttctgtttacttctgtgccagcagtacacacgtgtcgacgggccaacgtcctgactttcggggccggcagcaggctgaccgtgctgggtgagttttcgcgggaccacccgggcgggcatgcat

SEQ ID NO: 1474 - DNA, 239 bp, Artificial Sequence
  source: /note="Description of Artificial Sequence: Synthetic polynucleotide"
atgaattctactactcagctgctgctggtactactgacaaagaagtccccaatggctacaatgtctctagattaaacacagaggatttccctggtgtcggctgctccctcccagacatctgtgtacttgtgtgccagcagttccacagtgtcgacgggccaacgtcctgactttcggggccggcagcaggctgaccgtgctgggtgagttttcgcgggaccacccgggcgggcatgcat

SEQ ID NO: 1475 - DNA, 239 bp, Artificial Sequence
  source: /note="Description of Artificial Sequence: Synthetic polynucleotide"
atgaattctactcagttgctgctggtatcactgacaaaggagaagtccccgatggctacaatgtatccagatcaaacacagaggatttccctggagtcagctgctccctcccagacatctgtatacttctgtgccagcagtcagtctgtgtcgacgggccaacgtcctgactttcggggccggcagcaggctgaccgtgctgggtgagttttcgcgggaccacccgggcgggcatgcat

SEQ ID NO: 1476 - DNA, 239 bp, Artificial Sequence
  source: /note="Description of Artificial Sequence: Synthetic polynucleotide"
atgaattcttccaaggcaaggatgcagcagacaaatcggggcttccccgtgatcggttctctgcacagaggtctgagggatccatctccattccagcgcacacagcagggggacttggctgtgtatctctgtgccagcagctccatgtggtcgacgggccaacgtcctgactttcggggccggcagcaggctgaccgtgctgggtgagttttcgcgggaccacccgggcgggcatgcat

SEQ ID NO: 1477 - DNA, 239 bp, Artificial Sequence
  source: /note="Description of Artificial Sequence: Synthetic polynucleotide"
atgaattcttccaaggcaacagtgcaccagacaaatcagggctgcccagtgatcgcttctctgcagagaggactgggggatccgtctccaatccagcgcacacagcaggaggactcggccgtgtatctctgtgccagcagctcactgcagtcgacgggccaacgtcctgactttcggggccggcagcaggctgaccgtgctgggtgagttttcgcgggaccacccgggcgggcatgcat

SEQ ID NO: 1478 - DNA, 239 bp, Artificial Sequence
  source: /note="Description of Artificial Sequence: Synthetic polynucleotide"
atgaattcttccaaggcacgggtgcggcagatgactcagggctgcccaacgatcggttctttgcagtcaggcctgagggatccgtctctaatccagcgcacagagcggggggactcagccgtgtatctctgtgccagcagccaagtcacgtcgacgggccaacgtcctgactttcggggccggcagcaggctgaccgtgctgggtgagttttcgcgggaccacccgggcgggcatgcat

SEQ ID NO: 1479 - DNA, 239 bp, Artificial Sequence
  source: /note="Description of Artificial Sequence: Synthetic polynucleotide"
atgaattctcccagagtgatgctcaacgagacaaatcagggcggcccagtggtcggttctctgcagagaggcctgagagatccgtctccaatccagcgcacagagcagggggactcagctgtgtatctctgtgccagcagctagacggagtcgacgggccaacgtcctgactttcggggccggcagcaggctgaccgtgctgggtgagttttcgcgggaccacccgggcgggcatgcat

SEQ ID NO: 1480 - DNA, 239 bp, Artificial Sequence
  source: /note="Description of Artificial Sequence: Synthetic polynucleotide"
atgaattcttcaattatgaagcccaacaagacaaatcagggctgcccaatgatcggttctctgcagagaggcctgagggatccatctccaatccagcgcacagagcagcgggactcggccatgtatcgctgtgccagcagcgagcgatagtcgacgggccaacgtcctgactttcggggccggcagcaggctgaccgtgctgggtgagttttcgcgggaccacccgggcgggcatgcat

SEQ ID NO: 1481 - DNA, 239 bp, Artificial Sequence
  source: /note="Description of Artificial Sequence: Synthetic polynucleotide"
atgaattcttcaattatgaagctcaaccagacaaatcagggctgcccagtgatcggttctctgcagagaggcctgagggatccatctccaattcagcgcacagagcagcgggactcagccatgtatcgctgtgccagcagcctcgagaagtcgacgggccaacgtcctgactttcggggccggcagcaggctgaccgtgctgggtgagttttcgcgggaccacccgggcgggcatgcat

SEQ ID NO: 1482 - DNA, 239 bp, Artificial Sequence
  source: /note="Description of Artificial Sequence: Synthetic polynucleotide"
atgaattcttccagaatgaagctcaactagacaaatcggggctgcccagtgatcgcttctttgcagaaaggcctgagggatccgtctccaatccagcgcacacagcaggaggactccgccgtgtatctctgtgccagcagcatgacaccgtcgacgggccaacgtcctgactttcggggccggcagcaggctgaccgtgctgggtgagttttcgcgggaccacccgggcgggcatgcat

SEQ ID NO: 1483 - DNA, 239 bp, Artificial Sequence
  source: /note="Description of Artificial Sequence: Synthetic polynucleotide"
atgaattcttccagaatgaagctcaactagaaaaatcaaggctgctcagtgatcggttctctgcagagaggcctaagggatctttctccaatccagcgcacagagcagggggactcggccatgtatctctgtgccagcagccttcacgagtcgacgggccaacgtcctgactttcggggccggcagcaggctgaccgtgctgggtgagttttcgcgggaccacccgggcgggcatgcat

SEQ ID NO: 1484 - DNA, 239 bp, Artificial Sequence
  source: /note="Description of Artificial Sequence: Synthetic polynucleotide"
atgaattctcagtattataatggagaagagagagcaaaaggaaacattcttgaacgattctccgcacaacagttccctgacttgcactctcctgagctctctggagctgggggactcagctttgtatttctgtgccagcagcgtagagtgtcgacgggccaacgtcctgactttcggggccggcagcaggctgaccgtgctgggtgagttttcgcgggaccacccgggcgggcatgcat

SEQ ID NO: 1485 - DNA, 239 bp, Artificial Sequence
  source: /note="Description of Artificial Sequence: Synthetic polynucleotide"
atgaattctactcatatggtgttcacgacactaacaaaggagaagtctcagatggctacagtgtctctagatcaaacacagaggacctccctggagtctgctgcctcctcccagacatctgtatatttctgcgccagcagttcgtcgatgtcgacgggccaacgtcctgactttcggggccggcagcaggctgaccgtgctgggtgagttttcgcgggaccacccgggcgggcatgcat

SEQ ID NO: 1486 - DNA, 239 bp, Artificial Sequence
  source: /note="Description of Artificial Sequence: Synthetic polynucleotide"
atgaattctactcagcagctgctgatattacagataaaggagaagtccccgatggctatgttgtctccagatccaagacagagaatttccctggagtcagctacccgctcccagacatctgtgtatttctgcgccagcagtagctagtggtcgacgggccaacgtcctgactttcggggccggcagcaggctgaccgtgctgggtgagttttcgcgggaccacccgggcgggcatgcat

SEQ ID NO: 1487 - DNA, 239 bp, Artificial Sequence
  source: /note="Description of Artificial Sequence: Synthetic polynucleotide"
atgaattctactcatatggtgttaaagatactgacaaaggagaagtctcagatggctatagtgtctctagatcaaagacagaggatttccctggagtccgctaccagctcccagacatctgtgtacttctgtgccatcagttgagacctgtcgacgggccaacgtcctgactttcggggccggcagcaggctgaccgtgctgggtgagttttcgcgggaccacccgggcgggcatgcat

SEQ ID NO: 1488 - DNA, 239 bp, Artificial Sequence
  source: /note="Description of Artificial Sequence: Synthetic polynucleotide"
atgaattctttcaggatgagagtgtagtagatgattcacagttgcctaaggatcgattttctgcagagaggctcaaaggagtagactccaatccagcctgcagagcttggggactcggccatgtatctctgtgccagcagcgatggcttgtcgacgggccaacgtcctgactttcggggccggcagcaggctgaccgtgctgggtgagttttcgcgggaccacccgggcgggcatgcat

SEQ ID NO: 1489 - DNA, 239 bp, Artificial Sequence
  source: /note="Description of Artificial Sequence: Synthetic polynucleotide"
atgaattctttcagaataacggtgtagtggatgattcacagttgcctaaggatcgattttctgcagagaggctcaaaggagtagactccaatccagcctgcaaagcttgaggactcggccgtgtatctctgtgccagcagcgcatctgagtcgacgggccaacgtcctgactttcggggccggcagcaggctgaccgtgctgggtgagttttcgcgggaccacccgggcgggcatgcat

SEQ ID NO: 1490 - DNA, 239 bp, Artificial Sequence
  source: /note="Description of Artificial Sequence: Synthetic polynucleotide"
atgaattctatgagaatgaggaagcagtagacgattcacagttgcctaaggatcgattttctgcagagaggctcaaaggagtagactccaatccagcctgcagagcttggggactcggccgtgtatctctgtgccagcagcgacactctgtcgacgggccaacgtcctgactttcggggccggcagcaggctgaccgtgctgggtgagttttcgcgggaccacccgggcgggcatgcat

SEQ ID NO: 1491 - DNA, 239 bp, Artificial Sequence
  source: /note="Description of Artificial Sequence: Synthetic polynucleotide"
atgaattctttaacaacaacgttccgatagatgattcagggatgcccgaggatcgattctcagctaagatgcctaatgcatcattctccaatccagccctcagaacccagggactcagctgtgtacttctgtgccagcagttgctacacgtcgacgggccaacgtcctgactttcggggccggcagcaggctgaccgtgctgggtgagttttcgcgggaccacccgggcgggcatgcat

SEQ ID NO: 1492 - DNA, 239 bp, Artificial Sequence
  source: /note="Description of Artificial Sequence: Synthetic polynucleotide"
atgaattctttaacaacaacgttccgatagatgattcagggatgcccgaggatcgattctcagctaagatgcctaatgcatcattctccaatccagccctcagaacccagggactcagctgtgtacttctgtgccagcagttcagcttggtcgacgggccaacgtcctgactttcggggccggcagcaggctgaccgtgctgggtgagttttcgcgggaccacccgggcgggcatgcat

SEQ ID NO: 1493 - DNA, 239 bp, Artificial Sequence
  source: /note="Description of Artificial Sequence: Synthetic polynucleotide"
atgaattcttccgcaaccgggctcctctagatgattcggggatgccgaaggatcgattctcagcagagatgcctgatgcaactttagccaatccagccctcagaacccagggactcagctgtgtatttttgtgctagtggtttcggaacgtcgacgggccaacgtcctgactttcggggccggcagcaggctgaccgtgctgggtgagttttcgcgggaccacccgggcgggcatgcat

SEQ ID NO: 1494 - DNA, 239 bp, Artificial Sequence
  source: /note="Description of Artificial Sequence: Synthetic polynucleotide"
atgaattctcgttttatgaaaagatgcagagcgataaaggaagcatccctgatcgattctcagctcaacagttcagtgactatcattctgatgagctccttggagctgggggactcagccctgtacttctgtgccagcagcgcaattcggtcgacgggccaacgtcctgactttcggggccggcagcaggctgaccgtgctgggtgagttttcgcgggaccacccgggcgggcatgcat

SEQ ID NO: 1495 - DNA, 239 bp, Artificial Sequence
  source: /note="Description of Artificial Sequence: Synthetic polynucleotide"
atgaattctttgtgaaagagtctaaacaggatgagtccggtatgcccaacaatcgattcttagctgaaaggactggagggacgtattctagtgcagcctgcagaactggaggattctggagtttatttctgtgccagcagccaagaggtgtcgacgggccaacgtcctgactttcggggccggcagcaggctgaccgtgctgggtgagttttcgcgggaccacccgggcgggcatgcat

SEQ ID NO: 1496 - DNA, 239 bp, Artificial Sequence
  source: /note="Description of Artificial Sequence: Synthetic polynucleotide"
atgaattccactactatgacaaagattttaacaatgaagcagacacccctgataacttccaatccaggaggccgaacacttctttctgctatccgctcaccaggcctgggggacgcagccatgtacctgtgtgccaccagcgaatggacgtcgacgggccaacgtcctgactttcggggccggcagcaggctgaccgtgctgggtgagttttcgcgggaccacccgggcgggcatgcat

SEQ ID NO: 1497 - DNA, 239 bp, Artificial Sequence
  source: /note="Description of Artificial Sequence: Synthetic polynucleotide"
atgaattcttccagaatgaaaatgtctttgatgaaacaggtatgcccaaggaaagattttcagctaagtgcctcccaaattcaccctgtaatccaggctacgaagcttgaggattcagcagtgtatttttgtgccagcagcaactgccagtcgacgggccaacgtcctgactttcggggccggcagcaggctgaccgtgctgggtgagttttcgcgggaccacccgggcgggcatgcat

SEQ ID NO: 1498 - DNA, 239 bp, Artificial Sequence
  source: /note="Description of Artificial Sequence: Synthetic polynucleotide"
atgaattctccttccagtaccaaaacattgcagttgattcagggatgcccaaggaacgattcacagctgaaagacctaacggaacgtcttaagatccatcccgcagagccgagggactcagccgtgtatctctacagtagccctagtaggtcgacgggccaacgtcctgactttcggggccggcagcaggctgaccgtgctgggtgagttttcgcgggaccacccgggcgggcatgcat

SEQ ID NO: 1499 - DNA, 239 bp, Artificial Sequence
  source: /note="Description of Artificial Sequence: Synthetic polynucleotide"
atgaattcctccagaaagaaaatatcatagatgagtcaggaatgccaaaggaacgattttctgctgaatttcccaaagagggccccagcaatccagcaggtagtgcgaggagattcggcagcttatttctgtgccagctcactgacgttgtcgacgggccaacgtcctgactttcggggccggcagcaggctgaccgtgctgggtgagttttcgcgggaccacccgggcgggcatgcat

SEQ ID NO: 1500 - DNA, 239 bp, Artificial Sequence
  source: /note="Description of Artificial Sequence: Synthetic polynucleotide"
atgaattctactcacagatagtaaatgactttcagaaaggagatatagctgaagggtacagcgtctctcgggagaagaaggaatcctttcgtgacatcggcccaaaagaacccgacagctttctatctctgtgccagtagttgcagacagtcgacgggccaacgtcctgactttcggggccggcagcaggctgaccgtgctgggtgagttttcgcgggaccacccgggcgggcatgcat

SEQ ID NO: 1501 - DNA, 239 bp, Artificial Sequence
  source: /note="Description of Artificial Sequence: Synthetic polynucleotide"
atgaattctccaatgagggctccaaggccacatacgagcaaggcgtcgagaaggacaagtttctcatcaaccatgcaagcctgaccttgtacagtgaccagtgcccatcctgaagacagcagcttctacatctgcagtgctagttgaccgtcgacgggccaacgtcctgactttcggggccggcagcaggctgaccgtgctgggtgagttttcgcgggaccacccgggcgggcatgcat

SEQ ID NO: 1502 - DNA, 239 bp, Artificial Sequence
  source: /note="Description of Artificial Sequence: Synthetic polynucleotide"
atgaattcactcctttgatgtcaaagatataaacaaaggagagatctctgatggatacagtgtctctcgacaggcacaggctaaattctctagagtctgccatccccaaccagacagctctttacttctgtgccaccagtggtctcctagtcgacgggccaacgtcctgactttcggggccggcagcaggctgaccgtgctgggtgagttttcgcgggaccacccgggcgggcatgcat

SEQ ID NO: 1503 - DNA, 239 bp, Artificial Sequence
  source: /note="Description of Artificial Sequence: Synthetic polynucleotide"
atgaattctattcctatggagttaattccacagagaagggagatctttcctctgagtcaacagtctccagaataaggacggagcattttcctggagtctgccaggccctcacatacctctcagtacctctgtgccagcagtctgcaatcgtcgacgggccaacgtcctgactttcggggccggcagcaggctgaccgtgctgggtgagttttcgcgggaccacccgggcgggcatgcat

SEQ ID NO: 1504 - DNA, 239 bp, Artificial Sequence
  source: /note="Description of Artificial Sequence: Synthetic polynucleotide"
atgaattctattcaatgaatgttgaggtgactgataagggagatgttcctgaagggtacaaagtctctcgaaaagagaagaggaatttccctggagtcgcccagccccaaccagacctctctgtacttctgtgccagcagttgagcgaagtcgacgggccaacgtcctgactttcggggccggcagcaggctgaccgtgctgggtgagttttcgcgggaccacccgggcgggcatgcat

SEQ ID NO: 1505 - DNA, 239 bp, Artificial Sequence
  source: /note="Description of Artificial Sequence: Synthetic polynucleotide"
atgaattcttctcatatgatgttaaaatgaaagaaaaaggagatattcctgaggggtacagtgtctctagagagaagaaggagcgcttctctggagtccgccagcaccaaccagacatctatgtacctctgtgccagcagtttggactggtcgacgggccaacgtcctgactttcggggccggcagcaggctgaccgtgctgggtgagttttcgcgggaccacccgggcgggcatgcat

SEQ ID NO: 1506 - DNA, 239 bp, Artificial Sequence
  source: /note="Description of Artificial Sequence: Synthetic polynucleotide"
atgaattcgcaaatcagggctctgaggccacatatgagagtggatttgtcattgacaagtttcccatcagccgcccaaacctaacattctactgtgagcaacatgagccctgaagacagcagcatatatctctgcagcgttagcaatccgtcgacgggccaacgtcctgactttcggggccggcagcaggctgaccgtgctgggtgagttttcgcgggaccacccgggcgggcatgcat

SEQ ID NO: 1507 - DNA, 239 bp, Artificial Sequence
  source: /note="Description of Artificial Sequence: Synthetic polynucleotide"
atgaattcctcttctactccgttggtattggccagatcagctctgaggtgccccagaatctctcagcctccagaccccaggaccggcagtagttctaagaagctccttctcagtgactctggcttctatctctgtgcctggcgaactacgtcgacgggccaacgtcctgactttcggggccggcagcaggctgaccgtgctgggtgagttttcgcgggaccacccgggcgggcatgcat

SEQ ID NO: 1508 - DNA, 239 bp, Artificial Sequence
  source: /note="Description of Artificial Sequence: Synthetic polynucleotide"
atgaattcttttataataatgaaatctcagagaagtctgaaatattcgatgatcaattctcagttgaaaggcctgatggatcaaatttcaatccggtccacaaagctggaggactcagccatgtacttctgtgccagcagtcaaggtcagtcgacacgagcagtacttcgggccgggcaccaggctcacggtcacaggtgagattcgggcgtctccccaccttccagccccgcatgcat

SEQ ID NO: 1509 - DNA, 239 bp, Artificial Sequence
  source: /note="Description of Artificial Sequence: Synthetic polynucleotide"
atgaattcagctacaataataaggagctcattataaatgaaacagttccaaatcgcttctcacctaaatctccagacaaagctcacttaaatcaattccctggagcttggtgactctgctgtgtatttctgtgccagcagctacgtacggtcgacacgagcagtacttcgggccgggcaccaggctcacggtcacaggtgagattcgggcgtctccccaccttccagccccgcatgcat

SEQ ID NO: 1510 - DNA, 239 bp, Artificial Sequence
  source: /note="Description of Artificial Sequence: Synthetic polynucleotide"
atgaattcgtctacagctatgagaaactctctataaatgaaagtgtgccaagtcgcttctcacctgaatgccccaacagctctctcttaactacacgccctgcagccagaagactcagccctgtatctctgcgccagcagctacgcgttgtcgacacgagcagtacttcgggccgggcaccaggctcacggtcacaggtgagattcgggcgtctccccaccttccagccccgcatgcat

SEQ ID NO: 1511 - DNA, 239 bp, Artificial Sequence
  source: /note="Description of Artificial Sequence: Synthetic polynucleotide"
atgaattcgtctacaactttaaagaacagactgaaaacaacagtgtgccaagtcgcttctcacctgaatgccccaacagctctcacttatctacacaccctgcagccagaagactcggccctgtatctctgcgccagcagcctcagtgagtcgacacgagcagtacttcgggccgggcaccaggctcacggtcacaggtgagattcgggcgtctccccaccttccagccccgcatgcat

SEQ ID NO: 1512 - DNA, 239 bp, Artificial Sequence
  source: /note="Description of Artificial Sequence: Synthetic polynucleotide"
atgaattcgtctacagtcttgaagaacgggttgaaaacaacagtgtgccaagtcgcttctcacctgaatgccccaacagctctcacttatctacacaccctgcagccagaagactcggccctgtatctctgcgccagcagcgtgtctacgtcgacacgagcagtacttcgggccgggcaccaggctcacggtcacaggtgagattcgggcgtctccccaccttccagccccgcatgcat

SEQ ID NO: 1513 - DNA, 239 bp, Artificial Sequence
  source: /note="Description of Artificial Sequence: Synthetic polynucleotide"
atgaattctgaatacttcagtgagacacagagaaacaaaggaaacttccctggtcgattctcagggcgccagttctctaactctcgctcttgtgagcaccttggagctgggggactcggccctttatctttgcgccagcagagtaccgagtcgacacgagcagtacttcgggccgggcaccaggctcacggtcacaggtgagattcgggcgtctccccaccttccagccccgcatgcat

SEQ ID NO: 1514 - DNA, 239 bp, Artificial Sequence
  source: /note="Description of Artificial Sequence: Synthetic polynucleotide"
atgaattctgaatatgctaatgagttaaggagatcagaaggaaacttccctaatcgattctcagggcgccagttccatgactgttgctcttgtgagtgccttggagctgggggactcggccctgtatctctgtgccagaagttgcctcagtcgacacgagcagtacttcgggccgggcaccaggctcacggtcacaggtgagattcgggcgtctccccaccttccagccccgcatgcat

SEQ ID NO: 1515 - DNA, 239 bp, Artificial Sequence
  source: /note="Description of Artificial Sequence: Synthetic polynucleotide"
atgaattctcagtattatagggaggaagagaatggcagaggaaacttccctcctagattctcaggtctccagttccctaattatagctcttgtgaacgccttggagctggacgactcggccctgtatctctgtgccagcagtcgttagcgtcgacacgagcagtacttcgggccgggcaccaggctcacggtcacaggtgagattcgggcgtctccccaccttccagccccgcatgcat

SEQ ID NO: 1516 - DNA, 239 bp, Artificial Sequence
  source: /note="Description of Artificial Sequence: Synthetic polynucleotide"
atgaattctcagtattatgagaaagaagagagaggaagaggaaacttccctgatcgattctcagctcgccagttccctaactatagctcttgtgaacgccttgttgctgggggactcggccctgtatctctgtgccagcagtggacatggtcgacacgagcagtacttcgggccgggcaccaggctcacggtcacaggtgagattcgggcgtctccccaccttccagccccgcatgcat

SEQ ID NO: 1517 - DNA, 239 bp, Artificial Sequence
  source: /note="Description of Artificial Sequence: Synthetic polynucleotide"
atgaattctcagtattatgaggaggaagagagacagagaggcaacttccctgatcgattctcaggtcaccagttccctaactatagctcttgtgaacgccttgttgctgggggactcggccctctatctctgtgccagcagaggttgctgtcgacacgagcagtacttcgggccgggcaccaggctcacggtcacaggtgagattcgggcgtctccccaccttccagccccgcatgcat

SEQ ID NO: 1518 - DNA, 239 bp, Artificial Sequence
  source: /note="Description of Artificial Sequence: Synthetic polynucleotide"
atgaattctcagtattatgagaaagaagagagaggaagaggaaacttccctgatcaattctcaggtcaccagttccctaactatagctcttgtgaacgccttgttgctaggggactcggccctctatctctgtgccagcaggtacagtggtcgacacgagcagtacttcgggccgggcaccaggctcacggtcacaggtgagattcgggcgtctccccaccttccagccccgcatgcat

SEQ ID NO: 1519 - DNA, 239 bp, Artificial Sequence
  source: /note="Description of Artificial Sequence: Synthetic polynucleotide"
atgaattcttggtatgacgagggtgaagagagaaacagaggaaacttccctcctagattttcaggtcgccagttccctaattatagctcttgtgaacgccttggagctggaggactcggccctgtatctctgtgccagcagatccatgggtcgacacgagcagtacttcgggccgggcaccaggctcacggtcacaggtgagattcgggcgtctccccaccttccagccccgcatgcat

SEQ ID NO: 1520 - DNA, 239 bp, Artificial Sequence
  source: /note="Description of Artificial Sequence: Synthetic polynucleotide"
atgaattctactcagcttctgagggtaccactgacaaaggagaagtccccaatggctacaatgtctccagattaaacaaacgggagttctctggagtcggctgctccctcccagacatctgtgtacttctgtgccagcagttgatgcgagtcgacacgagcagtacttcgggccgggcaccaggctcacggtcacaggtgagattcgggcgtctccccaccttccagccccgcatgcat

SEQ ID NO: 1521 - DNA, 239 bp, Artificial Sequence
  source: /note="Description of Artificial Sequence: Synthetic polynucleotide"
atgaattctactcagttggtgagggtacaactgccaaaggagaggtccctgatggctacaatgtctccagattaaaaaaacagaatttccttggagtcggctgctccctcccaaacatctgtgtacttctgtgccagcagtgtagcagtgtcgacacgagcagtacttcgggccgggcaccaggctcacggtcacaggtgagattcgggcgtctccccaccttccagccccgcatgcat

SEQ ID NO: 1522 - DNA, 239 bp, Artificial Sequence
  source: /note="Description of Artificial Sequence: Synthetic polynucleotide"
atgaattctactcagttggtgagggtacaactgccaaaggagaggtccctgatggctacaatgtctccagattaaaaaaacagaatttccttggagtcggctgctccctcccaaacatctgtgtacttctgtgccagcagtggatcatcgtcgacacgagcagtacttcgggccgggcaccaggctcacggtcacaggtgagattcgggcgtctccccaccttccagccccgcatgcat

SEQ ID NO: 1523 - DNA, 239 bp, Artificial Sequence
  source: /note="Description of Artificial Sequence: Synthetic polynucleotide"
atgaattctattcaaatactgcaggtaccactggcaaaggagaagtccctgatggttatagtgtctccagagcaaacacagatgatttccttggcgtctgctgtaccctctcagacatctgtgtacttctgtgccagcagtgtgaacgtgtcgacacgagcagtacttcgggccgggcaccaggctcacggtcacaggtgagattcgggcgtctccccaccttccagccccgcatgcat

SEQ ID NO: 1524 - DNA, 239 bp, Artificial Sequence
  source: /note="Description of Artificial Sequence: Synthetic polynucleotide"
atgaattctactcagttggtgctggtatcactgaccaaggagaagtccccaatggctacaatgtctccagatcaaccacagaggatttccctgctgtcggctgctccctcccagacatctgtgtacttctgtgccagcagttgtcatcggtcgacacgagcagtacttcgggccgggcaccaggctcacggtcacaggtgagattcgggcgtctccccaccttccagccccgcatgcat

SEQ ID NO: 1525 - DNA, 239 bp, Artificial Sequence
  source: /note="Description of Artificial Sequence: Synthetic polynucleotide"
atgaattctattcagttggtgctggtatcactgacaaaggagaagtcccgaatggctacaacgtctccagatcaaccacagaggatttccctggagttggctgctccctcccagacatctgtgtacttctgtgccagcagtaggcttgagtcgacacgagcagtacttcgggccgggcaccaggctcacggtcacaggtgagattcgggcgtctccccaccttccagccccgcatgcat

SEQ ID NO: 1526 - DNA, 239 bp, Artificial Sequence
  source: /note="Description of Artificial Sequence: Synthetic polynucleotide"
atgaattctactcagttgctgctgctctcactgacaaaggagaagttcccaatggctacaatgtctccagatcaaacacagaggatttccctggagtcagctgctccctctcagacttctgtttacttctgtgccagcagtacacacgtgtcgacacgagcagtacttcgggccgggcaccaggctcacggtcacaggtgagattcgggcgtctccccaccttccagccccgcatgcat

SEQ ID NO: 1527 - DNA, 239 bp, Artificial Sequence
  source: /note="Description of Artificial Sequence: Synthetic polynucleotide"
atgaattctactactcagctgctgctggtactactgacaaagaagtccccaatggctacaatgtctctagattaaacacagaggatttccctggtgtcggctgctccctcccagacatctgtgtacttgtgtgccagcagttccacagtgtcgacacgagcagtacttcgggccgggcaccaggctcacggtcacaggtgagattcgggcgtctccccaccttccagccccgcatgcat

SEQ ID NO: 1528 - DNA, 239 bp, Artificial Sequence
  source: /note="Description of Artificial Sequence: Synthetic polynucleotide"
atgaattctactcagttgctgctggtatcactgacaaaggagaagtccccgatggctacaatgtatccagatcaaacacagaggatttccctggagtcagctgctccctcccagacatctgtatacttctgtgccagcagtcagtctgtgtcgacacgagcagtacttcgggccgggcaccaggctcacggtcacaggtgagattcgggcgtctccccaccttccagccccgcatgcat

SEQ ID NO: 1529 - DNA, 239 bp, Artificial Sequence
  source: /note="Description of Artificial Sequence: Synthetic polynucleotide"
atgaattcttccaaggcaaggatgcagcagacaaatcggggcttccccgtgatcggttctctgcacagaggtctgagggatccatctccattccagcgcacacagcagggggacttggctgtgtatctctgtgccagcagctccatgtggtcgacacgagcagtacttcgggccgggcaccaggctcacggtcacaggtgagattcgggcgtctccccaccttccagccccgcatgcat

SEQ ID NO: 1530 - DNA, 239 bp, Artificial Sequence
  source: /note="Description of Artificial Sequence: Synthetic polynucleotide"
atgaattcttccaaggcaacagtgcaccagacaaatcagggctgcccagtgatcgcttctctgcagagaggactgggggatccgtctccaatccagcgcacacagcaggaggactcggccgtgtatctctgtgccagcagctcactgcagtcgacacgagcagtacttcgggccgggcaccaggctcacggtcacaggtgagattcgggcgtctccccaccttccagccccgcatgcat

SEQ ID NO: 1531 - DNA, 239 bp, Artificial Sequence
  source: /note="Description of Artificial Sequence: Synthetic polynucleotide"
atgaattcttccaaggcacgggtgcggcagatgactcagggctgcccaacgatcggttctttgcagtcaggcctgagggatccgtctctaatccagcgcacagagcggggggactcagccgtgtatctctgtgccagcagccaagtcacgtcgacacgagcagtacttcgggccgggcaccaggctcacggtcacaggtgagattcgggcgtctccccaccttccagccccgcatgcat

SEQ ID NO: 1532 - DNA, 239 bp, Artificial Sequence
  source: /note="Description of Artificial Sequence: Synthetic polynucleotide"
atgaattctcccagagtgatgctcaacgagacaaatcagggcggcccagtggtcggttctctgcagagaggcctgagagatccgtctccaatccagcgcacagagcagggggactcagctgtgtatctctgtgccagcagctagacggagtcgacacgagcagtacttcgggccgggcaccaggctcacggtcacaggtgagattcgggcgtctccccaccttccagccccgcatgcat

SEQ ID NO: 1533 - DNA, 239 bp, Artificial Sequence
  source: /note="Description of Artificial Sequence: Synthetic polynucleotide"
atgaattcttcaattatgaagcccaacaagacaaatcagggctgcccaatgatcggttctctgcagagaggcctgagggatccatctccaatccagcgcacagagcagcgggactcggccatgtatcgctgtgccagcagcgagcgatagtcgacacgagcagtacttcgggccgggcaccaggctcacggtcacaggtgagattcgggcgtctccccaccttccagccccgcatgcat

SEQ ID NO: 1534 - DNA, 239 bp, Artificial Sequence
  source: /note="Description of Artificial Sequence: Synthetic polynucleotide"
atgaattcttcaattatgaagctcaaccagacaaatcagggctgcccagtgatcggttctctgcagagaggcctgagggatccatctccaattcagcgcacagagcagcgggactcagccatgtatcgctgtgccagcagcctcgagaagtcgacacgagcagtacttcgggccgggcaccaggctcacggtcacaggtgagattcgggcgtctccccaccttccagccccgcatgcat

SEQ ID NO: 1535 - DNA, 239 bp, Artificial Sequence
  source: /note="Description of Artificial Sequence: Synthetic polynucleotide"
atgaattcttccagaatgaagctcaactagacaaatcggggctgcccagtgatcgcttctttgcagaaaggcctgagggatccgtctccaatccagcgcacacagcaggaggactccgccgtgtatctctgtgccagcagcatgacaccgtcgacacgagcagtacttcgggccgggcaccaggctcacggtcacaggtgagattcgggcgtctccccaccttccagccccgcatgcat

SEQ ID NO: 1536 - DNA, 239 bp, Artificial Sequence
  source: /note="Description of Artificial Sequence: Synthetic polynucleotide"
atgaattcttccagaatgaagctcaactagaaaaatcaaggctgctcagtgatcggttctctgcagagaggcctaagggatctttctccaatccagcgcacagagcagggggactcggccatgtatctctgtgccagcagccttcacgagtcgacacgagcagtacttcgggccgggcaccaggctcacggtcacaggtgagattcgggcgtctccccaccttccagccccgcatgcat

SEQ ID NO: 1537 - DNA, 239 bp, Artificial Sequence
  source: /note="Description of Artificial Sequence: Synthetic polynucleotide"
atgaattctcagtattataatggagaagagagagcaaaaggaaacattcttgaacgattctccgcacaacagttccctgacttgcactctcctgagctctctggagctgggggactcagctttgtatttctgtgccagcagcgtagagtgtcgacacgagcagtacttcgggccgggcaccaggctcacggtcacaggtgagattcgggcgtctccccaccttccagccccgcatgcat

SEQ ID NO: 1538 - DNA, 239 bp, Artificial Sequence
  source: /note="Description of Artificial Sequence: Synthetic polynucleotide"
atgaattctactcatatggtgttcacgacactaacaaaggagaagtctcagatggctacagtgtctctagatcaaacacagaggacctccctggagtctgctgcctcctcccagacatctgtatatttctgcgccagcagttcgtcgatgtcgacacgagcagtacttcgggccgggcaccaggctcacggtcacaggtgagattcgggcgtctccccaccttccagccccgcatgcat

SEQ ID NO: 1539 - DNA, 239 bp, Artificial Sequence
  source: /note="Description of Artificial Sequence: Synthetic polynucleotide"
atgaattctactcagcagctgctgatattacagataaaggagaagtccccgatggctatgttgtctccagatccaagacagagaatttccctggagtcagctacccgctcccagacatctgtgtatttctgcgccagcagtagctagtggtcgacacgagcagtacttcgggccgggcaccaggctcacggtcacaggtgagattcgggcgtctccccaccttccagccccgcatgcat

SEQ ID NO: 1540 - DNA, 239 bp, Artificial Sequence
  source: /note="Description of Artificial Sequence: Synthetic polynucleotide"
atgaattctactcatatggtgttaaagatactgacaaaggagaagtctcagatggctatagtgtctctagatcaaagacagaggatttccctggagtccgctaccagctcccagacatctgtgtacttctgtgccatcagttgagacctgtcgacacgagcagtacttcgggccgggcaccaggctcacggtcacaggtgagattcgggcgtctccccaccttccagccccgcatgcat

SEQ ID NO: 1541 - DNA, 239 bp, Artificial Sequence
  source: /note="Description of Artificial Sequence: Synthetic polynucleotide"
atgaattctttcaggatgagagtgtagtagatgattcacagttgcctaaggatcgattttctgcagagaggctcaaaggagtagactccaatccagcctgcagagcttggggactcggccatgtatctctgtgccagcagcgatggcttgtcgacacgagcagtacttcgggccgggcaccaggctcacggtcacaggtgagattcgggcgtctccccaccttccagccccgcatgcat

SEQ ID NO: 1542 - DNA, 239 bp, Artificial Sequence
  source: /note="Description of Artificial Sequence: Synthetic polynucleotide"
atgaattctttcagaataacggtgtagtggatgattcacagttgcctaaggatcgattttctgcagagaggctcaaaggagtagactccaatccagcctgcaaagcttgaggactcggccgtgtatctctgtgccagcagcgcatctgagtcgacacgagcagtacttcgggccgggcaccaggctcacggtcacaggtgagattcgggcgtctccccaccttccagccccgcatgcat

SEQ ID NO: 1543 - DNA, 239 bp, Artificial Sequence
  source: /note="Description of Artificial Sequence: Synthetic polynucleotide"
atgaattctatgagaatgaggaagcagtagacgattcacagttgcctaaggatcgattttctgcagagaggctcaaaggagtagactccaatccagcctgcagagcttggggactcggccgtgtatctctgtgccagcagcgacactctgtcgacacgagcagtacttcgggccgggcaccaggctcacggtcacaggtgagattcgggcgtctccccaccttccagccccgcatgcat

SEQ ID NO: 1544 - DNA, 239 bp, Artificial Sequence
  source: /note="Description of Artificial Sequence: Synthetic polynucleotide"
atgaattctttaacaacaacgttccgatagatgattcagggatgcccgaggatcgattctcagctaagatgcctaatgcatcattctccaatccagccctcagaacccagggactcagctgtgtacttctgtgccagcagttgctacacgtcgacacgagcagtacttcgggccgggcaccaggctcacggtcacaggtgagattcgggcgtctccccaccttccagccccgcatgcat

SEQ ID NO: 1545 - DNA, 239 bp, Artificial Sequence
  source: /note="Description of Artificial Sequence: Synthetic polynucleotide"
atgaattctttaacaacaacgttccgatagatgattcagggatgcccgaggatcgattctcagctaagatgcctaatgcatcattctccaatccagccctcagaacccagggactcagctgtgtacttctgtgccagcagttcagcttggtcgacacgagcagtacttcgggccgggcaccaggctcacggtcacaggtgagattcgggcgtctccccaccttccagccccgcatgcat

SEQ ID NO: 1546 - DNA, 239 bp, Artificial Sequence
  source: /note="Description of Artificial Sequence: Synthetic polynucleotide"
atgaattcttccgcaaccgggctcctctagatgattcggggatgccgaaggatcgattctcagcagagatgcctgatgcaactttagccaatccagccctcagaacccagggactcagctgtgtatttttgtgctagtggtttcggaacgtcgacacgagcagtacttcgggccgggcaccaggctcacggtcacaggtgagattcgggcgtctccccaccttccagccccgcatgcat

SEQ ID NO: 1547 - DNA, 239 bp, Artificial Sequence
  source: /note="Description of Artificial Sequence: Synthetic polynucleotide"
atgaattctcgttttatgaaaagatgcagagcgataaaggaagcatccctgatcgattctcagctcaacagttcagtgactatcattctgatgagctccttggagctgggggactcagccctgtacttctgtgccagcagcgcaattcggtcgacacgagcagtacttcgggccgggcaccaggctcacggtcacaggtgagattcgggcgtctccccaccttccagccccgcatgcat

SEQ ID NO: 1548 - DNA, 239 bp, Artificial Sequence
  source: /note="Description of Artificial Sequence: Synthetic polynucleotide"
atgaattctttgtgaaagagtctaaacaggatgagtccggtatgcccaacaatcgattcttagctgaaaggactggagggacgtattctagtgcagcctgcagaactggaggattctggagtttatttctgtgccagcagccaagaggtgtcgacacgagcagtacttcgggccgggcaccaggctcacggtcacaggtgagattcgggcgtctccccaccttccagccccgcatgcat

SEQ ID NO: 1549 - DNA, 239 bp, Artificial Sequence
  source: /note="Description of Artificial Sequence: Synthetic polynucleotide"
atgaattccactactatgacaaagattttaacaatgaagcagacacccctgataacttccaatccaggaggccgaacacttctttctgctatccgctcaccaggcctgggggacgcagccatgtacctgtgtgccaccagcgaatggacgtcgacacgagcagtacttcgggccgggcaccaggctcacggtcacaggtgagattcgggcgtctccccaccttccagccccgcatgcat

SEQ ID NO: 1550 - DNA, 239 bp, Artificial Sequence
  source: /note="Description of Artificial Sequence: Synthetic polynucleotide"
atgaattcttccagaatgaaaatgtctttgatgaaacaggtatgcccaaggaaagattttcagctaagtgcctcccaaattcaccctgtaatccaggctacgaagcttgaggattcagcagtgtatttttgtgccagcagcaactgccagtcgacacgagcagtacttcgggccgggcaccaggctcacggtcacaggtgagattcgggcgtctccccaccttccagccccgcatgcat

SEQ ID NO: 1551 - DNA, 239 bp, Artificial Sequence
  source: /note="Description of Artificial Sequence: Synthetic polynucleotide"
atgaattctccttccagtaccaaaacattgcagttgattcagggatgcccaaggaacgattcacagctgaaagacctaacggaacgtcttaagatccatcccgcagagccgagggactcagccgtgtatctctacagtagccctagtaggtcgacacgagcagtacttcgggccgggcaccaggctcacggtcacaggtgagattcgggcgtctccccaccttccagccccgcatgcat

SEQ ID NO: 1552 - DNA, 239 bp, Artificial Sequence
  source: /note="Description of Artificial Sequence: Synthetic polynucleotide"
atgaattcctccagaaagaaaatatcatagatgagtcaggaatgccaaaggaacgattttctgctgaatttcccaaagagggccccagcaatccagcaggtagtgcgaggagattcggcagcttatttctgtgccagctcactgacgttgtcgacacgagcagtacttcgggccgggcaccaggctcacggtcacaggtgagattcgggcgtctccccaccttccagccccgcatgcat

SEQ ID NO: 1553 - DNA, 239 bp, Artificial Sequence
  source: /note="Description of Artificial Sequence: Synthetic polynucleotide"
atgaattctactcacagatagtaaatgactttcagaaaggagatatagctgaagggtacagcgtctctcgggagaagaaggaatcctttcgtgacatcggcccaaaagaacccgacagctttctatctctgtgccagtagttgcagacagtcgacacgagcagtacttcgggccgggcaccaggctcacggtcacaggtgagattcgggcgtctccccaccttccagccccgcatgcat

SEQ ID NO: 1554 - DNA, 239 bp, Artificial Sequence
  source: /note="Description of Artificial Sequence: Synthetic polynucleotide"
atgaattctccaatgagggctccaaggccacatacgagcaaggcgtcgagaaggacaagtttctcatcaaccatgcaagcctgaccttgtacagtgaccagtgcccatcctgaagacagcagcttctacatctgcagtgctagttgaccgtcgacacgagcagtacttcgggccgggcaccaggctcacggtcacaggtgagattcgggcgtctccccaccttccagccccgcatgcat

SEQ ID NO: 1555 - DNA, 239 bp, Artificial Sequence
  source: /note="Description of Artificial Sequence: Synthetic polynucleotide"
atgaattcactcctttgatgtcaaagatataaacaaaggagagatctctgatggatacagtgtctctcgacaggcacaggctaaattctctagagtctgccatccccaaccagacagctctttacttctgtgccaccagtggtctcctagtcgacacgagcagtacttcgggccgggcaccaggctcacggtcacaggtgagattcgggcgtctccccaccttccagccccgcatgcat

SEQ ID NO: 1556 - DNA, 239 bp, Artificial Sequence
  source: /note="Description of Artificial Sequence: Synthetic polynucleotide"
atgaattctattcctatggagttaattccacagagaagggagatctttcctctgagtcaacagtctccagaataaggacggagcattttcctggagtctgccaggccctcacatacctctcagtacctctgtgccagcagtctgcaatcgtcgacacgagcagtacttcgggccgggcaccaggctcacggtcacaggtgagattcgggcgtctccccaccttccagccccgcatgcat

SEQ ID NO: 1557 - DNA, 239 bp, Artificial Sequence
  source: /note="Description of Artificial Sequence: Synthetic polynucleotide"
atgaattctattcaatgaatgttgaggtgactgataagggagatgttcctgaagggtacaaagtctctcgaaaagagaagaggaatttccctggagtcgcccagccccaaccagacctctctgtacttctgtgccagcagttgagcgaagtcgacacgagcagtacttcgggccgggcaccaggctcacggtcacaggtgagattcgggcgtctccccaccttccagccccgcatgcat

SEQ ID NO: 1558 - DNA, 239 bp, Artificial Sequence
  source: /note="Description of Artificial Sequence: Synthetic polynucleotide"
atgaattcttctcatatgatgttaaaatgaaagaaaaaggagatattcctgaggggtacagtgtctctagagagaagaaggagcgcttctctggagtccgccagcaccaaccagacatctatgtacctctgtgccagcagtttggactggtcgacacgagcagtacttcgggccgggcaccaggctcacggtcacaggtgagattcgggcgtctccccaccttccagccccgcatgcat

SEQ ID NO: 1559 - DNA, 239 bp, Artificial Sequence
  source: /note="Description of Artificial Sequence: Synthetic polynucleotide"
atgaattcgcaaatcagggctctgaggccacatatgagagtggatttgtcattgacaagtttcccatcagccgcccaaacctaacattctactgtgagcaacatgagccctgaagacagcagcatatatctctgcagcgttagcaatccgtcgacacgagcagtacttcgggccgggcaccaggctcacggtcacaggtgagattcgggcgtctccccaccttccagccccgcatgcat

SEQ ID NO: 1560 - DNA, 239 bp, Artificial Sequence
  source: /note="Description of Artificial Sequence: Synthetic polynucleotide"
atgaattcctcttctactccgttggtattggccagatcagctctgaggtgccccagaatctctcagcctccagaccccaggaccggcagtagttctaagaagctccttctcagtgactctggcttctatctctgtgcctggcgaactacgtcgacacgagcagtacttcgggccgggcaccaggctcacggtcacaggtgagattcgggcgtctccccaccttccagccccgcatgcat

SEQ ID NO: 1561 - DNA, 495 bp, Artificial Sequence
  source: /note="Description of Artificial Sequence: Synthetic polynucleotide"
gccttgccagcccgctcagcaaggtcattgcctcaagtcagatatcttccaacttggaagggagaacgaagtcagtcaccaggctgactgggtcatctgctgaaatcacctgtgatcttcctggagcaagtaccttatacatccactggtacctgcaccaggaggggaaggccccacagtgtcttctgtactatgaaccctactactccagggttgtgctggaatcaggaatcactccaggaaagtatgacactggaagcacaaggagcaattggaatttgagactgcaaaatctaattaaaaatgattctgggttctattactgtgccacctggtgacaaggtcattgcctcagtcgacattataagaaactctttggcagtggaacaacacttgttgtcacaggtaagtatcggaagaatacaacatttccaaggtaatagagggaaggcaggaaatgcaaggtcattgcctcactgatggcgcgagggaggc

SEQ ID NO: 1562 - DNA, 495 bp, Artificial Sequence
  source: /note="Description of Artificial Sequence: Synthetic polynucleotide"
gccttgccagcccgctcaggcataactttgcctcacagaaatcttccaacttggaagggagaacgaagtcagtcatcaggcagactgggtcatctgctgaaatcacttgtgatcttgctgaaggaagtaacggctacatccactggtacctacaccaggaggggaaggccccacagcgtcttcagtactatgactcctacaactccaaggttgtgttggaatcaggagtcagtccagggaagtattatacttacgcaagcacaaggaacaacttgagattgatactgcgaaatctaattgaaaatgactttggggtctattactgtgccacctggtgagcataactttgcctcagtcgacattataagaaactctttggcagtggaacaacacttgttgtcacaggtaagtatcggaagaatacaacatttccaaggtaatagagggaaggcaggaaatggcataactttgcctcactgatggcgcgagggaggc

SEQ ID NO: 1563 - DNA, 495 bp, Artificial Sequence
  source: /note="Description of Artificial Sequence: Synthetic polynucleotide"
gccttgccagcccgctcagctctgattttgcctcacagaaatcttccaacttggaagggagaacgaagtcagtcaccaggcagactgggtcatctgctgaaatcacttgcgatcttactgtaacaaataccttctacatccactggtacctacaccaggaggggaaggccccacagcgtcttctgtactatgacgtctccaccgcaagggatgtgttggaatcaggactcagtccaggaaagtattatactcatacacccaggaggtggagctggatattgagactgcaaaatctaattgaaaatgattctggggtctattactgtgccacctggtgactctgattttgcctcagtcgacattataagaaactctttggcagtggaacaacacttgttgtcacaggtaagtatcggaagaatacaacatttccaaggtaatagagggaaggcaggaaatgctctgattttgcctcactgatggcgcgagggaggc

SEQ ID NO: 1564 - DNA, 495 bp, Artificial Sequence
  source: /note="Description of Artificial Sequence: Synthetic polynucleotide"
gccttgccagcccgctcagtacgtacgttgcctcacagaaatcttccaacttggaagggagaacgaagtcagtcatcaggcagactgggtcatctgctgaaatcacttgtgatcttgctgaaggaagtaccggctacatccactggtacctacaccaggaggggaaggccccacagcgtcttctgtactatgactcctacacctccagcgttgtgttggaatcaggaatcagcccagggaagtatgatacttacggaagcacaaggaagaacttgagaatgatactgcgaaatcttattgaaaatgactctggagtctattactgtgccacctggtgatacgtacgttgcctcagtcgacattataagaaactctttggcagtggaacaacacttgttgtcacaggtaagtatcggaagaatacaacatttccaaggtaatagagggaaggcaggaaatgtacgtacgttgcctcactgatggcgcgagggaggc

SEQ ID NO: 1565 - DNA, 495 bp, Artificial Sequence
  source: /note="Description of Artificial Sequence: Synthetic polynucleotide"
gccttgccagcccgctcagtacgcgttttgcctcacagaaatcttccaacttggaagggggaacgaagtcagtcacgaggccgactaggtcatctgctgaaatcacttgtgaccttactgtaataaatgccttctacatccactggtacctacaccaggaggggaaggccccacagcgtcttctgtactatgacgtctccaactcaaaggatgtgttggaatcaggactcagtccaggaaagtattatactcatacacccaggaggtggagctggatattgatactacgaaatctaattgaaaatgattctggggtctattactgtgccacctggtgatacgcgttttgcctcagtcgacattataagaaactctttggcagtggaacaacacttgttgtcacaggtaagtatcggaagaatacaacatttccaaggtaatagagggaaggcaggaaatgtacgcgttttgcctcactgatggcgcgagggaggc

SEQ ID NO: 1566 - DNA, 495 bp, Artificial Sequence
  source: /note="Description of Artificial Sequence: Synthetic polynucleotide"
gccttgccagcccgctcagctcagtgattgcctcacagaaatcttccaacttggaagggagaatgaagtcagtcaccaggccgactgggtcatctgctgaaatcacttgtgaccttactgtaataaatgccgtctacatccactggtacctacagcaggaggggaagaccccacagcatcttctgcactatgatgtctccaactcaagggatgtgttggaatcaggtctcagtcttggaaagtattatactcatacaccgaggaggtggagctggaatttgagactgcaaaatctaattgaaaatgattctggggtctattactgtgccacctggtgactcagtgattgcctcagtcgacattataagaaactctttggcagtggaacaacacttgttgtcacaggtaagtatcggaagaatacaacatttccaaggtaatagagggaaggcaggaaatgctcagtgattgcctcactgatggcgcgagggaggc

SEQ ID NO: 1567 - DNA, 495 bp, Artificial Sequence
  source: /note="Description of Artificial Sequence: Synthetic polynucleotide"
gccttgccagcccgctcagtctgatatttgcctcaagtcagatatctactaacttggaagcgaaaataaagtcaggcaccaggcagatggggtcatctgctgtaatcacctgtgatcttcctgtagaaaatgccttctacatccactggtacctacgccaggaggggaaggccccacagcatcttctgtactatgacatctgcaactccagggatatgttggaatcaggagtcagtcaggaaagcatgatacttatggaagtagaaggataagctggaaatttatacctccaaaactaaatgaaaatgcctctggggtctattactgtgccaccttgatctgatatttgcctcagtcgacattataagaaactctttggcagtggaacaacacttgttgtcacaggtaagtatcggaagaatacaacatttccaaggtaatagagggaaggcaggaaatgtctgatatttgcctcactgatggcgcgagggaggc

SEQ ID NO: 1568 - DNA, 495 bp, Artificial Sequence
  source: /note="Description of Artificial Sequence: Synthetic polynucleotide"
gccttgccagcccgctcagcatatgctttgcctcaagtcagaaatcttccaacttgcaagggagaaggaagtcagtcaccaggccagctgggtcatctgctgtaatcacttgtgatcttactgtaataaataccttctacatccactggtacctgcaccaggcggggaaggccccacagcatcttccatactatgacccctactactccagggttgtgttggaatcaagaatcagtagaggaaagtattttacttatgcaagcatgaggaggagctggaaattgatactgcaaaatctaattgaaaatgattctggatctattactgtgccaccttgacatatgctttgcctcagtcgacattataagaaactctttggcagtggaacaacacttgttgtcacaggtaagtatcggaagaatacaacatttccaaggtaatagagggaaggcaggaaatgcatatgctttgcctcactgatggcgcgagggaggc

SEQ ID NO: 1569 - DNA, 495 bp, Artificial Sequence
  source: /note="Description of Artificial Sequence: Synthetic polynucleotide"
gccttgccagcccgctcagcgtaattattgcctcacagaaatcttccaacttggaagggagaacaaagtcagtcaccaggccaactgggtcatcagctgtaatcacttgtgatcttcctgtagaaaatgccgtctacacccactggtacctacaccaggaggggaaggccccacagcgtcttctgtactatgactcctacaactccagggttgtgttggaatcaggaatcagtcgagaaaagtatcatacttatgcaagcacagggaagagccttaaatttatactggaaaatctaattgaacgtgactctggggtctattactgtgccacctggtgacgtaattattgcctcagtcgacattataagaaactctttggcagtggaacaacacttgttgtcacaggtaagtatcggaagaatacaacatttccaaggtaatagagggaaggcaggaaatgcgtaattattgcctcactgatggcgcgagggaggc

SEQ ID NO: 1570 - DNA, 495 bp, Artificial Sequence
  source: /note="Description of Artificial Sequence: Synthetic polynucleotide"
gccttgccagcccgctcagacgtactcttgcctcagcaggtcacctagagcaacctcaaatttccagtactaaaacgctgtcaaaaacagcccgcctggaatgtgtggtgtctggaataacaatttctgcaacatctgtatattggtatcgagagagacctggtgaagtcatacagttcctggtgtccatttcatatgacggcactgtcagaaaggaatccggcattccgtcaggcaaatttgaggtggataggatacctgaaacgtctacatccactctcaccattcacaatgtagagaaacaggacatagctacctactactgtgccttgtggtgaacgtactcttgcctcagtcgacattataagaaactctttggcagtggaacaacacttgttgtcacaggtaagtatcggaagaatacaacatttccaaggtaatagagggaaggcaggaaatgacgtactcttgcctcactgatggcgcgagggaggc

SEQ ID NO: 1571 - DNA, 495 bp, Artificial Sequence
  source: /note="Description of Artificial Sequence: Synthetic polynucleotide"
gccttgccagcccgctcagcttctaagttgcctcattatcaaaagtggagcagttccagctatccatttccacggaagtcaagaaaagtattgacataccttgcaagatatcgagcacaaggtttgaaacagatgtcattcactggtaccggcagaaaccaaatcaggctttggagcacctgatctatattgtctcaacaaaatccgcagctcgacgcagcatgggtaagacaagcaacaaagtggaggcaagaaagaattctcaaactctcacttcaatccttaccatcaagtccgtagagaaagaagacatggccgtttactactgtgctgcgtgacttctaagttgcctcagtcgacattataagaaactctttggcagtggaacaacacttgttgtcacaggtaagtatcggaagaatacaacatttccaaggtaatagagggaaggcaggaaatgcttctaagttgcctcactgatggcgcgagggaggc

SEQ ID NO: 1572 - DNA, 495 bp, Artificial Sequence
  source: /note="Description of Artificial Sequence: Synthetic polynucleotide"
gccttgccagcccgctcagactatgacttgcctcagggcagttggaacaacctgaaatatctatttccagaccagcaaataagagtgcccacatatcttggaaggcatccatccaaggctttagcagtaaaatcatacactggtactggcagaaaccaaacaaaggcttagaatatttattacatgtcttcttgacaatctctgctcaagattgctcaggtgggaagactaagaaacttgaggtaagtaaaaatgctcacacttccacttccactttgaaaataaagttcttagagaaagaagatgaggtggtgtaccactgtgcctgctggatttgaactatgacttgcctcagtcgacattataagaaactctttggcagtggaacaacacttgttgtcacaggtaagtatcggaagaatacaacatttccaaggtaatagagggaaggcaggaaatgactatgacttgcctcactgatggcgcgagggaggc

SEQ ID NO: 1573 - DNA, 495 bp, Artificial Sequence
  source: /note="Description of Artificial Sequence: Synthetic polynucleotide"
gccttgccagcccgctcaggacgttaattgcctcatccctgacagctggctggtggctcatcaggccggagcagctggcccatgtcctggggcactagggaagcttggtcatcctgcagtgcgtggtccgcaccaggatcagctacacccactggtaccagcagaagggccaggtccctgaggcactccaccagctggccatgtccaagttggatgtgcagtgggattccatcctgaaagcagataaaatcatagccaaggatggcagcagctctatcttggcagtactgaagttggagacaggcatcgagggcatgaactactgcacaacctggtgagacgttaattgcctcagtcgacattataagaaactctttggcagtggaacaacacttgttgtcacaggtaagtatcggaagaatacaacatttccaaggtaatagagggaaggcaggaaatggacgttaattgcctcactgatggcgcgagggaggc

SEQ ID NO: 1574 - DNA, 495 bp, Artificial Sequence
  source: /note="Description of Artificial Sequence: Synthetic polynucleotide"
gccttgccagcccgctcagacaagatattgcctcagcaataaaaaatgtcaactacatttttgtcaacagagcaacagataaaagtgtctaggtatcttgtgtggtgtccactgaagactttgtaaatatagttatacactggtaccagcagaaactgaatctaaattatgagccatctgacaactatcacttcaataacaagccccagttcgagtttgcttaggtgagaaaaacaagaaacttgaggcaagaacaaattttcaaatgtctacttcagtctttaccataaacttcataggaaaggaagatgaggccatttactactgcactgctttgaacaagatattgcctcagtcgacattataagaaactctttggcagtggaacaacacttgttgtcacaggtaagtatcggaagaatacaacatttccaaggtaatagagggaaggcaggaaatgacaagatattgcctcactgatggcgcgagggaggc

SEQ ID NO: 1575 - DNA, 495 bp, Artificial Sequence
  source: /note="Description of Artificial Sequence: Synthetic polynucleotide"
gccttgccagcccgctcagcaaggtcatcgttagcagtcagatatcttccaacttggaagggagaacgaagtcagtcaccaggctgactgggtcatctgctgaaatcacctgtgatcttcctggagcaagtaccttatacatccactggtacctgcaccaggaggggaaggccccacagtgtcttctgtactatgaaccctactactccagggttgtgctggaatcaggaatcactccaggaaagtatgacactggaagcacaaggagcaattggaatttgagactgcaaaatctaattaaaaatgattctgggttctattactgtgccacctggtgacaaggtcatcgttagcgtcgacattataagaaactctttggcagtggaacaacacttgttgtcacaggtaagtatcggaagaatacaacatttccaaggtaatagagggaaagcaggaaattcaaggtcatcgttagcctgatggcgcgagggaggc

SEQ ID NO: 1576 - DNA, 495 bp, Artificial Sequence
  source: /note="Description of Artificial Sequence: Synthetic polynucleotide"
gccttgccagcccgctcaggcataacttcgttagccagaaatcttccaacttggaagggagaacgaagtcagtcatcaggcagactgggtcatctgctgaaatcacttgtgatcttgctgaaggaagtaacggctacatccactggtacctacaccaggaggggaaggccccacagcgtcttcagtactatgactcctacaactccaaggttgtgttggaatcaggagtcagtccagggaagtattatacttacgcaagcacaaggaacaacttgagattgatactgcgaaatctaattgaaaatgactttggggtctattactgtgccacctggtgagcataacttcgttagcgtcgacattataagaaactctttggcagtggaacaacacttgttgtcacaggtaagtatcggaagaatacaacatttccaaggtaatagagggaaagcaggaaattgcataacttcgttagcctgatggcgcgagggaggc

SEQ ID NO: 1577 - DNA, 495 bp, Artificial Sequence
  source: /note="Description of Artificial Sequence: Synthetic polynucleotide"
gccttgccagcccgctcagctctgatttcgttagccagaaatcttccaacttggaagggagaacgaagtcagtcaccaggcagactgggtcatctgctgaaatcacttgcgatcttactgtaacaaataccttctacatccactggtacctacaccaggaggggaaggccccacagcgtcttctgtactatgacgtctccaccgcaagggatgtgttggaatcaggactcagtccaggaaagtattatactcatacacccaggaggtggagctggatattgagactgcaaaatctaattgaaaatgattctggggtctattactgtgccacctggtgactctgatttcgttagcgtcgacattataagaaactctttggcagtggaacaacacttgttgtcacaggtaagtatcggaagaatacaacatttccaaggtaatagagggaaagcaggaaattctctgatttcgttagcctgatggcgcgagggaggc

SEQ ID NO: 1578 - DNA, 495 bp, Artificial Sequence
  source: /note="Description of Artificial Sequence: Synthetic polynucleotide"
gccttgccagcccgctcagtacgtacgtcgttagccagaaatcttccaacttggaagggagaacgaagtcagtcatcaggcagactgggtcatctgctgaaatcacttgtgatcttgctgaaggaagtaccggctacatccactggtacctacaccaggaggggaaggccccacagcgtcttctgtactatgactcctacacctccagcgttgtgttggaatcaggaatcagcccagggaagtatgatacttacggaagcacaaggaagaacttgagaatgatactgcgaaatcttattgaaaatgactctggagtctattactgtgccacctggtgatacgtacgtcgttagcgtcgacattataagaaactctttggcagtggaacaacacttgttgtcacaggtaagtatcggaagaatacaacatttccaaggtaatagagggaaagcaggaaatttacgtacgtcgttagcctgatggcgcgagggaggc

SEQ ID NO: 1579 - DNA, 495 bp, Artificial Sequence
  source: /note="Description of Artificial Sequence: Synthetic polynucleotide"
gccttgccagcccgctcagtacgcgtttcgttagccagaaatcttccaacttggaagggggaacgaagtcagtcacgaggccgactaggtcatctgctgaaatcacttgtgaccttactgtaataaatgccttctacatccactggtacctacaccaggaggggaaggccccacagcgtcttctgtactatgacgtctccaactcaaaggatgtgttggaatcaggactcagtccaggaaagtattatactcatacacccaggaggtggagctggatattgatactacgaaatctaattgaaaatgattctggggtctattactgtgccacctggtgatacgcgtttcgttagcgtcgacattataagaaactctttggcagtggaacaacacttgttgtcacaggtaagtatcggaagaatacaacatttccaaggtaatagagggaaagcaggaaatttacgcgtttcgttagcctgatggcgcgagggaggc

SEQ ID NO: 1580 - DNA, 495 bp, Artificial Sequence
  source: /note="Description of Artificial Sequence: Synthetic polynucleotide"
gccttgccagcccgctcagctcagtgatcgttagccagaaatcttccaacttggaagggagaatgaagtcagtcaccaggccgactgggtcatctgctgaaatcacttgtgaccttactgtaataaatgccgtctacatccactggtacctacagcaggaggggaagaccccacagcatcttctgcactatgatgtctccaactcaagggatgtgttggaatcaggtctcagtcttggaaagtattatactcatacaccgaggaggtggagctggaatttgagactgcaaaatctaattgaaaatgattctggggtctattactgtgccacctggtgactcagtgatcgttagcgtcgacattataagaaactctttggcagtggaacaacacttgttgtcacaggtaagtatcggaagaatacaacatttccaaggtaatagagggaaagcaggaaattctcagtgatcgttagcctgatggcgcgagggaggc

SEQ ID NO: 1581 - DNA, 495 bp, Artificial Sequence
  source: /note="Description of Artificial Sequence: Synthetic polynucleotide"
gccttgccagcccgctcagtctgatattcgttagcagtcagatatctactaacttggaagcgaaaataaagtcaggcaccaggcagatggggtcatctgctgtaatcacctgtgatcttcctgtagaaaatgccttctacatccactggtacctacgccaggaggggaaggccccacagcatcttctgtactatgacatctgcaactccagggatatgttggaatcaggagtcagtcaggaaagcatgatacttatggaagtagaaggataagctggaaatttatacctccaaaactaaatgaaaatgcctctggggtctattactgtgccaccttgatctgatattcgttagcgtcgacattataagaaactctttggcagtggaacaacacttgttgtcacaggtaagtatcggaagaatacaacatttccaaggtaatagagggaaagcaggaaatttctgatattcgttagcctgatggcgcgagggaggc

SEQ ID NO: 1582 - DNA, 495 bp, Artificial Sequence
  source: /note="Description of Artificial Sequence: Synthetic polynucleotide"
gccttgccagcccgctcagcatatgcttcgttagcagtcagaaatcttccaacttgcaagggagaaggaagtcagtcaccaggccagctgggtcatctgctgtaatcacttgtgatcttactgtaataaataccttctacatccactggtacctgcaccaggcggggaaggccccacagcatcttccatactatgacccctactactccagggttgtgttggaatcaagaatcagtagaggaaagtattttacttatgcaagcatgaggaggagctggaaattgatactgcaaaatctaattgaaaatgattctggatctattactgtgccaccttgacatatgcttcgttagcgtcgacattataagaaactctttggcagtggaacaacacttgttgtcacaggtaagtatcggaagaatacaacatttccaaggtaatagagggaaagcaggaaattcatatgcttcgttagcctgatggcgcgagggaggc

SEQ ID NO: 1583 - DNA, 495 bp, Artificial Sequence
  source: /note="Description of Artificial Sequence: Synthetic polynucleotide"
gccttgccagcccgctcagcgtaattatcgttagccagaaatcttccaacttggaagggagaacaaagtcagtcaccaggccaactgggtcatcagctgtaatcacttgtgatcttcctgtagaaaatgccgtctacacccactggtacctacaccaggaggggaaggccccacagcgtcttctgtactatgactcctacaactccagggttgtgttggaatcaggaatcagtcgagaaaagtatcatacttatgcaagcacagggaagagccttaaatttatactggaaaatctaattgaacgtgactctggggtctattactgtgccacctggtgacgtaattatcgttagcgtcgacattataagaaactctttggcagtggaacaacacttgttgtcacaggtaagtatcggaagaatacaacatttccaaggtaatagagggaaagcaggaaattcgtaattatcgttagcctgatggcgcgagggaggc

SEQ ID NO: 1584 - DNA, 495 bp, Artificial Sequence
  source: /note="Description of Artificial Sequence: Synthetic polynucleotide"
gccttgccagcccgctcagacgtactctcgttagcgcaggtcacctagagcaacctcaaatttccagtactaaaacgctgtcaaaaacagcccgcctggaatgtgtggtgtctggaataacaatttctgcaacatctgtatattggtatcgagagagacctggtgaagtcatacagttcctggtgtccatttcatatgacggcactgtcagaaaggaatccggcattccgtcaggcaaatttgaggtggataggatacctgaaacgtctacatccactctcaccattcacaatgtagagaaacaggacatagctacctactactgtgccttgtggtgaacgtactctcgttagcgtcgacattataagaaactctttggcagtggaacaacacttgttgtcacaggtaagtatcggaagaatacaacatttccaaggtaatagagggaaagcaggaaattacgtactctcgttagcctgatggcgcgagggaggc

SEQ ID NO: 1585 - DNA, 495 bp, Artificial Sequence
  source: /note="Description of Artificial Sequence: Synthetic polynucleotide"
gccttgccagcccgctcagcttctaagtcgttagcttatcaaaagtggagcagttccagctatccatttccacggaagtcaagaaaagtattgacataccttgcaagatatcgagcacaaggtttgaaacagatgtcattcactggtaccggcagaaaccaaatcaggctttggagcacctgatctatattgtctcaacaaaatccgcagctcgacgcagcatgggtaagacaagcaacaaagtggaggcaagaaagaattctcaaactctcacttcaatccttaccatcaagtccgtagagaaagaagacatggccgtttactactgtgctgcgtgacttctaagtcgttagcgtcgacattataagaaactctttggcagtggaacaacacttgttgtcacaggtaagtatcggaagaatacaacatttccaaggtaatagagggaaagcaggaaattcttctaagtcgttagcctgatggcgcgagggaggc

SEQ ID NO: 1586 - DNA, 495 bp, Artificial Sequence
  source: /note="Description of Artificial Sequence: Synthetic polynucleotide"
gccttgccagcccgctcagactatgactcgttagcgggcagttggaacaacctgaaatatctatttccagaccagcaaataagagtgcccacatatcttggaaggcatccatccaaggctttagcagtaaaatcatacactggtactggcagaaaccaaacaaaggcttagaatatttattacatgtcttcttgacaatctctgctcaagattgctcaggtgggaagactaagaaacttgaggtaagtaaaaatgctcacacttccacttccactttgaaaataaagttcttagagaaagaagatgaggtggtgtaccactgtgcctgctggatttgaactatgactcgttagcgtcgacattataagaaactctttggcagtggaacaacacttgttgtcacaggtaagtatcggaagaatacaacatttccaaggtaatagagggaaagcaggaaattactatgactcgttagcctgatggcgcgagggaggc

SEQ ID NO: 1587 - DNA, 495 bp, Artificial Sequence
  source: /note="Description of Artificial Sequence: Synthetic polynucleotide"
gccttgccagcccgctcaggacgttaatcgttagctccctgacagctggctggtggctcatcaggccggagcagctggcccatgtcctggggcactagggaagcttggtcatcctgcagtgcgtggtccgcaccaggatcagctacacccactggtaccagcagaagggccaggtccctgaggcactccaccagctggccatgtccaagttggatgtgcagtgggattccatcctgaaagcagataaaatcatagccaaggatggcagcagctctatcttggcagtactgaagttggagacaggcatcgagggcatgaactactgcacaacctggtgagacgttaatcgttagcgtcgacattataagaaactctttggcagtggaacaacacttgttgtcacaggtaagtatcggaagaatacaacatttccaaggtaatagagggaaagcaggaaattgacgttaatcgttagcctgatggcgcgagggaggc

SEQ ID NO: 1588 - DNA, 495 bp, Artificial Sequence
  source: /note="Description of Artificial Sequence: Synthetic polynucleotide"
gccttgccagcccgctcagacaagatatcgttagcgcaataaaaaatgtcaactacatttttgtcaacagagcaacagataaaagtgtctaggtatcttgtgtggtgtccactgaagactttgtaaatatagttatacactggtaccagcagaaactgaatctaaattatgagccatctgacaactatcacttcaataacaagccccagttcgagtttgcttaggtgagaaaaacaagaaacttgaggcaagaacaaattttcaaatgtctacttcagtctttaccataaacttcataggaaaggaagatgaggccatttactactgcactgctttgaacaagatatcgttagcgtcgacattataagaaactctttggcagtggaacaacacttgttgtcacaggtaagtatcggaagaatacaacatttccaaggtaatagagggaaagcaggaaattacaagatatcgttagcctgatggcgcgagggaggc

SEQ ID NO: 1589 - DNA, 495 bp, Artificial Sequence
  source: /note="Description of Artificial Sequence: Synthetic polynucleotide"
gccttgccagcccgctcagcaaggtcatatagttcagtcagatatcttccaacttggaagggagaacgaagtcagtcaccaggctgactgggtcatctgctgaaatcacctgtgatcttcctggagcaagtaccttatacatccactggtacctgcaccaggaggggaaggccccacagtgtcttctgtactatgaaccctactactccagggttgtgctggaatcaggaatcactccaggaaagtatgacactggaagcacaaggagcaattggaatttgagactgcaaaatctaattaaaaatgattctgggttctattactgtgccacctggtgacaaggtcatatagttcgtcgacaagagttgggcaaaaaaatcaaggtatttggtcccggaacaaagcttatcattacaggtaagttttctttaaattttgcaatgtaaagaagggatgggagcaaggtcatatagttcctgatggcgcgagggaggc

SEQ ID NO: 1590 - DNA, 495 bp, Artificial Sequence
  source: /note="Description of Artificial Sequence: Synthetic polynucleotide"
gccttgccagcccgctcaggcataacttatagttccagaaatcttccaacttggaagggagaacgaagtcagtcatcaggcagactgggtcatctgctgaaatcacttgtgatcttgctgaaggaagtaacggctacatccactggtacctacaccaggaggggaaggccccacagcgtcttcagtactatgactcctacaactccaaggttgtgttggaatcaggagtcagtccagggaagtattatacttacgcaagcacaaggaacaacttgagattgatactgcgaaatctaattgaaaatgactttggggtctattactgtgccacctggtgagcataacttatagttcgtcgacaagagttgggcaaaaaaatcaaggtatttggtcccggaacaaagcttatcattacaggtaagttttctttaaattttgcaatgtaaagaagggatgggaggcataacttatagttcctgatggcgcgagggaggc

SEQ ID NO: 1591 - DNA, 495 bp, Artificial Sequence
  source: /note="Description of Artificial Sequence: Synthetic polynucleotide"
gccttgccagcccgctcagctctgatttatagttccagaaatcttccaacttggaagggagaacgaagtcagtcaccaggcagactgggtcatctgctgaaatcacttgcgatcttactgtaacaaataccttctacatccactggtacctacaccaggaggggaaggccccacagcgtcttctgtactatgacgtctccaccgcaagggatgtgttggaatcaggactcagtccaggaaagtattatactcatacacccaggaggtggagctggatattgagactgcaaaatctaattgaaaatgattctggggtctattactgtgccacctggtgactctgatttatagttcgtcgacaagagttgggcaaaaaaatcaaggtatttggtcccggaacaaagcttatcattacaggtaagttttctttaaattttgcaatgtaaagaagggatgggagctctgatttatagttcctgatggcgcgagggaggc

SEQ ID NO: 1592 - DNA, 495 bp, Artificial Sequence
  source: /note="Description of Artificial Sequence: Synthetic polynucleotide"
gccttgccagcccgctcagtacgtacgtatagttccagaaatcttccaacttggaagggagaacgaagtcagtcatcaggcagactgggtcatctgctgaaatcacttgtgatcttgctgaaggaagtaccggctacatccactggtacctacaccaggaggggaaggccccacagcgtcttctgtactatgactcctacacctccagcgttgtgttggaatcaggaatcagcccagggaagtatgatacttacggaagcacaaggaagaacttgagaatgatactgcgaaatcttattgaaaatgactctggagtctattactgtgccacctggtgatacgtacgtatagttcgtcgacaagagttgggcaaaaaaatcaaggtatttggtcccggaacaaagcttatcattacaggtaagttttctttaaattttgcaatgtaaagaagggatgggagtacgtacgtatagttcctgatggcgcgagggaggc

SEQ ID NO: 1593 - DNA, 495 bp, Artificial Sequence
  source: /note="Description of Artificial Sequence: Synthetic polynucleotide"
gccttgccagcccgctcagtacgcgtttatagttccagaaatcttccaacttggaagggggaacgaagtcagtcacgaggccgactaggtcatctgctgaaatcacttgtgaccttactgtaataaatgccttctacatccactggtacctacaccaggaggggaaggccccacagcgtcttctgtactatgacgtctccaactcaaaggatgtgttggaatcaggactcagtccaggaaagtattatactcatacacccaggaggtggagctggatattgatactacgaaatctaattgaaaatgattctggggtctattactgtgccacctggtgatacgcgtttatagttcgtcgacaagagttgggcaaaaaaatcaaggtatttggtcccggaacaaagcttatcattacaggtaagttttctttaaattttgcaatgtaaagaagggatgggagtacgcgtttatagttcctgatggcgcgagggaggc

SEQ ID NO: 1594 - DNA, 495 bp, Artificial Sequence
  source: /note="Description of Artificial Sequence: Synthetic polynucleotide"
gccttgccagcccgctcagctcagtgatatagttccagaaatcttccaacttggaagggagaatgaagtcagtcaccaggccgactgggtcatctgctgaaatcacttgtgaccttactgtaataaatgccgtctacatccactggtacctacagcaggaggggaagaccccacagcatcttctgcactatgatgtctccaactcaagggatgtgttggaatcaggtctcagtcttggaaagtattatactcatacaccgaggaggtggagctggaatttgagactgcaaaatctaattgaaaatgattctggggtctattactgtgccacctggtgactcagtgatatagttcgtcgacaagagttgggcaaaaaaatcaaggtatttggtcccggaacaaagcttatcattacaggtaagttttctttaaattttgcaatgtaaagaagggatgggagctcagtgatatagttcctgatggcgcgagggaggc

SEQ ID NO: 1595 - DNA, 495 bp, Artificial Sequence
  source: /note="Description of Artificial Sequence: Synthetic polynucleotide"
gccttgccagcccgctcagtctgatattatagttcagtcagatatctactaacttggaagcgaaaataaagtcaggcaccaggcagatggggtcatctgctgtaatcacctgtgatcttcctgtagaaaatgccttctacatccactggtacctacgccaggaggggaaggccccacagcatcttctgtactatgacatctgcaactccagggatatgttggaatcaggagtcagtcaggaaagcatgatacttatggaagtagaaggataagctggaaatttatacctccaaaactaaatgaaaatgcctctggggtctattactgtgccaccttgatctgatattatagttcgtcgacaagagttgggcaaaaaaatcaaggtatttggtcccggaacaaagcttatcattacaggtaagttttctttaaattttgcaatgtaaagaagggatgggagtctgatattatagttcctgatggcgcgagggaggc

SEQ ID NO: 1596 - DNA, 495 bp, Artificial Sequence
  source: /note="Description of Artificial Sequence: Synthetic polynucleotide"
gccttgccagcccgctcagcatatgcttatagttcagtcagaaatcttccaacttgcaagggagaaggaagtcagtcaccaggccagctgggtcatctgctgtaatcacttgtgatcttactgtaataaataccttctacatccactggtacctgcaccaggcggggaaggccccacagcatcttccatactatgacccctactactccagggttgtgttggaatcaagaatcagtagaggaaagtattttacttatgcaagcatgaggaggagctggaaattgatactgcaaaatctaattgaaaatgattctggatctattactgtgccaccttgacatatgcttatagttcgtcgacaagagttgggcaaaaaaatcaaggtatttggtcccggaacaaagcttatcattacaggtaagttttctttaaattttgcaatgtaaagaagggatgggagcatatgcttatagttcctgatggcgcgagggaggc

SEQ ID NO: 1597 - DNA, 495 bp, Artificial Sequence
  source: /note="Description of Artificial Sequence: Synthetic polynucleotide"
gccttgccagcccgctcagcgtaattatatagttccagaaatcttccaacttggaagggagaacaaagtcagtcaccaggccaactgggtcatcagctgtaatcacttgtgatcttcctgtagaaaatgccgtctacacccactggtacctacaccaggaggggaaggccccacagcgtcttctgtactatgactcctacaactccagggttgtgttggaatcaggaatcagtcgagaaaagtatcatacttatgcaagcacagggaagagccttaaatttatactggaaaatctaattgaacgtgactctggggtctattactgtgccacctggtgacgtaattatatagttcgtcgacaagagttgggcaaaaaaatcaaggtatttggtcccggaacaaagcttatcattacaggtaagttttctttaaattttgcaatgtaaagaagggatgggagcgtaattatatagttcctgatggcgcgagggaggc

SEQ ID NO: 1598 - DNA, 495 bp, Artificial Sequence
  source: /note="Description of Artificial Sequence: Synthetic polynucleotide"
gccttgccagcccgctcagacgtactctatagttcgcaggtcacctagagcaacctcaaatttccagtactaaaacgctgtcaaaaacagcccgcctggaatgtgtggtgtctggaataacaatttctgcaacatctgtatattggtatcgagagagacctggtgaagtcatacagttcctggtgtccatttcatatgacggcactgtcagaaaggaatccggcattccgtcaggcaaatttgaggtggataggatacctgaaacgtctacatccactctcaccattcacaatgtagagaaacaggacatagctacctactactgtgccttgtggtgaacgtactctatagttcgtcgacaagagttgggcaaaaaaatcaaggtatttggtcccggaacaaagcttatcattacaggtaagttttctttaaattttgcaatgtaaagaagggatgggagacgtactctatagttcctgatggcgcgagggaggc

SEQ ID NO: 1599 - DNA, 495 bp, Artificial Sequence
  source: /note="Description of Artificial Sequence: Synthetic polynucleotide"
gccttgccagcccgctcagcttctaagtatagttcttatcaaaagtggagcagttccagctatccatttccacggaagtcaagaaaagtattgacataccttgcaagatatcgagcacaaggtttgaaacagatgtcattcactggtaccggcagaaaccaaatcaggctttggagcacctgatctatattgtctcaacaaaatccgcagctcgacgcagcatgggtaagacaagcaacaaagtggaggcaagaaagaattctcaaactctcacttcaatccttaccatcaagtccgtagagaaagaagacatggccgtttactactgtgctgcgtgacttctaagtatagttcgtcgacaagagttgggcaaaaaaatcaaggtatttggtcccggaacaaagcttatcattacaggtaagttttctttaaattttgcaatgtaaagaagggatgggagcttctaagtatagttcctgatggcgcgagggaggc

SEQ ID NO: 1600 - DNA, 495 bp, Artificial Sequence
  source: /note="Description of Artificial Sequence: Synthetic polynucleotide"
gccttgccagcccgctcagactatgactatagttcgggcagttggaacaacctgaaatatctatttccagaccagcaaataagagtgcccacatatcttggaaggcatccatccaaggctttagcagtaaaatcatacactggtactggcagaaaccaaacaaaggcttagaatatttattacatgtcttcttgacaatctctgctcaagattgctcaggtgggaagactaagaaacttgaggtaagtaaaaatgctcacacttccacttccactttgaaaataaagttcttagagaaagaagatgaggtggtgtaccactgtgcctgctggatttgaactatgactatagttcgtcgacaagagttgggcaaaaaaatcaaggtatttggtcccggaacaaagcttatcattacaggtaagttttctttaaattttgcaatgtaaagaagggatgggagactatgactatagttcctgatggcgcgagggaggc

SEQ ID NO: 1601 - DNA, 495 bp, Artificial Sequence
  source: /note="Description of Artificial Sequence: Synthetic polynucleotide"
gccttgccagcccgctcaggacgttaatatagttctccctgacagctggctggtggctcatcaggccggagcagctggcccatgtcctggggcactagggaagcttggtcatcctgcagtgcgtggtccgcaccaggatcagctacacccactggtaccagcagaagggccaggtccctgaggcactccaccagctggccatgtccaagttggatgtgcagtgggattccatcctgaaagcagataaaatcatagccaaggatggcagcagctctatcttggcagtactgaagttggagacaggcatcgagggcatgaactactgcacaacctggtgagacgttaatatagttcgtcgacaagagttgggcaaaaaaatcaaggtatttggtcccggaacaaagcttatcattacaggtaagttttctttaaattttgcaatgtaaagaagggatgggaggacgttaatatagttcctgatggcgcgagggaggc

SEQ ID NO: 1602 - DNA, 495 bp, Artificial Sequence
  source: /note="Description of Artificial Sequence: Synthetic polynucleotide"
gccttgccagcccgctcagacaagatatatagttcgcaataaaaaatgtcaactacatttttgtcaacagagcaacagataaaagtgtctaggtatcttgtgtggtgtccactgaagactttgtaaatatagttatacactggtaccagcagaaactgaatctaaattatgagccatctgacaactatcacttcaataacaagccccagttcgagtttgcttaggtgagaaaaacaagaaacttgaggcaagaacaaattttcaaatgtctacttcagtctttaccataaacttcataggaaaggaagatgaggccatttactactgcactgctttgaacaagatatatagttcgtcgacaagagttgggcaaaaaaatcaaggtatttggtcccggaacaaagcttatcattacaggtaagttttctttaaattttgcaatgtaaagaagggatgggagacaagatatatagttcctgatggcgcgagggaggc

SEQ ID NO: 1603 - DNA, 495 bp, Artificial Sequence
  source: /note="Description of Artificial Sequence: Synthetic polynucleotide"
gccttgccagcccgctcagcaaggtcatggcgtatagtcagatatcttccaacttggaagggagaacgaagtcagtcaccaggctgactgggtcatctgctgaaatcacctgtgatcttcctggagcaagtaccttatacatccactggtacctgcaccaggaggggaaggccccacagtgtcttctgtactatgaaccctactactccagggttgtgctggaatcaggaatcactccaggaaagtatgacactggaagcacaaggagcaattggaatttgagactgcaaaatctaattaaaaatgattctgggttctattactgtgccacctggtgacaaggtcatggcgtatgtcgacactggttggttcaagatatttgctgaagggactaagctcatagtaacttcacctggtaagtaacttttctttctgtttttattccagtaatgaaaaactgcaaggtcatggcgtatctgatggcgcgagggaggc

SEQ ID NO: 1604 - DNA, 495 bp, Artificial Sequence
  source: /note="Description of Artificial Sequence: Synthetic polynucleotide"
gccttgccagcccgctcaggcataacttggcgtatcagaaatcttccaacttggaagggagaacgaagtcagtcatcaggcagactgggtcatctgctgaaatcacttgtgatcttgctgaaggaagtaacggctacatccactggtacctacaccaggaggggaaggccccacagcgtcttcagtactatgactcctacaactccaaggttgtgttggaatcaggagtcagtccagggaagtattatacttacgcaagcacaaggaacaacttgagattgatactgcgaaatctaattgaaaatgactttggggtctattactgtgccacctggtgagcataacttggcgtatgtcgacactggttggttcaagatatttgctgaagggactaagctcatagtaacttcacctggtaagtaacttttctttctgtttttattccagtaatgaaaaactggcataacttggcgtatctgatggcgcgagggaggc

SEQ ID NO: 1605 - DNA, 495 bp, Artificial Sequence
  source: /note="Description of Artificial Sequence: Synthetic polynucleotide"
gccttgccagcccgctcagctctgatttggcgtatcagaaatcttccaacttggaagggagaacgaagtcagtcaccaggcagactgggtcatctgctgaaatcacttgcgatcttactgtaacaaataccttctacatccactggtacctacaccaggaggggaaggccccacagcgtcttctgtactatgacgtctccaccgcaagggatgtgttggaatcaggactcagtccaggaaagtattatactcatacacccaggaggtggagctggatattgagactgcaaaatctaattgaaaatgattctggggtctattactgtgccacctggtgactctgatttggcgtatgtcgacactggttggttcaagatatttgctgaagggactaagctcatagtaacttcacctggtaagtaacttttctttctgtttttattccagtaatgaaaaactgctctgatttggcgtatctgatggcgcgagggaggc

SEQ ID NO: 1606 - DNA, 495 bp, Artificial Sequence
  source: /note="Description of Artificial Sequence: Synthetic polynucleotide"
gccttgccagcccgctcagtacgtacgtggcgtatcagaaatcttccaacttggaagggagaacgaagtcagtcatcaggcagactgggtcatctgctgaaatcacttgtgatcttgctgaaggaagtaccggctacatccactggtacctacaccaggaggggaaggccccacagcgtcttctgtactatgactcctacacctccagcgttgtgttggaatcaggaatcagcccagggaagtatgatacttacggaagcacaaggaagaacttgagaatgatactgcgaaatcttattgaaaatgactctggagtctattactgtgccacctggtgatacgtacgtggcgtatgtcgacactggttggttcaagatatttgctgaagggactaagctcatagtaacttcacctggtaagtaacttttctttctgtttttattccagtaatgaaaaactgtacgtacgtggcgtatctgatggcgcgagggaggc

SEQ ID NO: 1607 - DNA, 495 bp, Artificial Sequence
  source: /note="Description of Artificial Sequence: Synthetic polynucleotide"
gccttgccagcccgctcagtacgcgtttggcgtatcagaaatcttccaacttggaagggggaacgaagtcagtcacgaggccgactaggtcatctgctgaaatcacttgtgaccttactgtaataaatgccttctacatccactggtacctacaccaggaggggaaggccccacagcgtcttctgtactatgacgtctccaactcaaaggatgtgttggaatcaggactcagtccaggaaagtattatactcatacacccaggaggtggagctggatattgatactacgaaatctaattgaaaatgattctggggtctattactgtgccacctggtgatacgcgtttggcgtatgtcgacactggttggttcaagatatttgctgaagggactaagctcatagtaacttcacctggtaagtaacttttctttctgtttttattccagtaatgaaaaactgtacgcgtttggcgtatctgatggcgcgagggaggc

SEQ ID NO: 1608 - DNA, 495 bp, Artificial Sequence
  source: /note="Description of Artificial Sequence: Synthetic polynucleotide"
gccttgccagcccgctcagctcagtgatggcgtatcagaaatcttccaacttggaagggagaatgaagtcagtcaccaggccgactgggtcatctgctgaaatcacttgtgaccttactgtaataaatgccgtctacatccactggtacctacagcaggaggggaagaccccacagcatcttctgcactatgatgtctccaactcaagggatgtgttggaatcaggtctcagtcttggaaagtattatactcatacaccgaggaggtggagctggaatttgagactgcaaaatctaattgaaaatgattctggggtctattactgtgccacctggtgactcagtgatggcgtatgtcgacactggttggttcaagatatttgctgaagggactaagctcatagtaacttcacctggtaagtaacttttctttctgtttttattccagtaatgaaaaactgctcagtgatggcgtatctgatggcgcgagggaggc

SEQ ID NO: 1609 - DNA, 495 bp, Artificial Sequence
  source: /note="Description of Artificial Sequence: Synthetic polynucleotide"
gccttgccagcccgctcagtctgatattggcgtatagtcagatatctactaacttggaagcgaaaataaagtcaggcaccaggcagatggggtcatctgctgtaatcacctgtgatcttcctgtagaaaatgccttctacatccactggtacctacgccaggaggggaaggccccacagcatcttctgtactatgacatctgcaactccagggatatgttggaatcaggagtcagtcaggaaagcatgatacttatggaagtagaaggataagctggaaatttatacctccaaaactaaatgaaaatgcctctggggtctattactgtgccaccttgatctgatattggcgtatgtcgacactggttggttcaagatatttgctgaagggactaagctcatagtaacttcacctggtaagtaacttttctttctgtttttattccagtaatgaaaaactgtctgatattggcgtatctgatggcgcgagggaggc

SEQ ID NO: 1610 - DNA, 495 bp, Artificial Sequence
  source: /note="Description of Artificial Sequence: Synthetic polynucleotide"
gccttgccagcccgctcagcatatgcttggcgtatagtcagaaatcttccaacttgcaagggagaaggaagtcagtcaccaggccagctgggtcatctgctgtaatcacttgtgatcttactgtaataaataccttctacatccactggtacctgcaccaggcggggaaggccccacagcatcttccatactatgacccctactactccagggttgtgttggaatcaagaatcagtagaggaaagtattttacttatgcaagcatgaggaggagctggaaattgatactgcaaaatctaattgaaaatgattctggatctattactgtgccaccttgacatatgcttggcgtatgtcgacactggttggttcaagatatttgctgaagggactaagctcatagtaacttcacctggtaagtaacttttctttctgtttttattccagtaatgaaaaactgcatatgcttggcgtatctgatggcgcgagggaggc

SEQ ID NO: 1611 - DNA, 495 bp, Artificial Sequence
  source: /note="Description of Artificial Sequence: Synthetic polynucleotide"
gccttgccagcccgctcagcgtaattatggcgtatcagaaatcttccaacttggaagggagaacaaagtcagtcaccaggccaactgggtcatcagctgtaatcacttgtgatcttcctgtagaaaatgccgtctacacccactggtacctacaccaggaggggaaggccccacagcgtcttctgtactatgactcctacaactccagggttgtgttggaatcaggaatcagtcgagaaaagtatcatacttatgcaagcacagggaagagccttaaatttatactggaaaatctaattgaacgtgactctggggtctattactgtgccacctggtgacgtaattatggcgtatgtcgacactggttggttcaagatatttgctgaagggactaagctcatagtaacttcacctggtaagtaacttttctttctgtttttattccagtaatgaaaaactgcgtaattatggcgtatctgatggcgcgagggaggc

SEQ ID NO: 1612 - DNA, 495 bp, Artificial Sequence
  source: /note="Description of Artificial Sequence: Synthetic polynucleotide"
gccttgccagcccgctcagacgtactctggcgtatgcaggtcacctagagcaacctcaaatttccagtactaaaacgctgtcaaaaacagcccgcctggaatgtgtggtgtctggaataacaatttctgcaacatctgtatattggtatcgagagagacctggtgaagtcatacagttcctggtgtccatttcatatgacggcactgtcagaaaggaatccggcattccgtcaggcaaatttgaggtggataggatacctgaaacgtctacatccactctcaccattcacaatgtagagaaacaggacatagctacctactactgtgccttgtggtgaacgtactctggcgtatgtcgacactggttggttcaagatatttgctgaagggactaagctcatagtaacttcacctggtaagtaacttttctttctgtttttattccagtaatgaaaaactgacgtactctggcgtatctgatggcgcgagggaggc

SEQ ID NO: 1613 - DNA, 495 bp, Artificial Sequence
  source: /note="Description of Artificial Sequence: Synthetic polynucleotide"
gccttgccagcccgctcagcttctaagtggcgtatttatcaaaagtggagcagttccagctatccatttccacggaagtcaagaaaagtattgacataccttgcaagatatcgagcacaaggtttgaaacagatgtcattcactggtaccggcagaaaccaaatcaggctttggagcacctgatctatattgtctcaacaaaatccgcagctcgacgcagcatgggtaagacaagcaacaaagtggaggcaagaaagaattctcaaactctcacttcaatccttaccatcaagtccgtagagaaagaagacatggccgtttactactgtgctgcgtgacttctaagtggcgtatgtcgacactggttggttcaagatatttgctgaagggactaagctcatagtaacttcacctggtaagtaacttttctttctgtttttattccagtaatgaaaaactgcttctaagtggcgtatctgatggcgcgagggaggc

SEQ ID NO: 1614 - DNA, 495 bp, Artificial Sequence
  source: /note="Description of Artificial Sequence: Synthetic polynucleotide"
gccttgccagcccgctcagactatgactggcgtatgggcagttggaacaacctgaaatatctatttccagaccagcaaataagagtgcccacatatcttggaaggcatccatccaaggctttagcagtaaaatcatacactggtactggcagaaaccaaacaaaggcttagaatatttattacatgtcttcttgacaatctctgctcaagattgctcaggtgggaagactaagaaacttgaggtaagtaaaaatgctcacacttccacttccactttgaaaataaagttcttagagaaagaagatgaggtggtgtaccactgtgcctgctggatttgaactatgactggcgtatgtcgacactggttggttcaagatatttgctgaagggactaagctcatagtaacttcacctggtaagtaacttttctttctgtttttattccagtaatgaaaaactgactatgactggcgtatctgatggcgcgagggaggc

SEQ ID NO: 1615 - DNA, 495 bp, Artificial Sequence
  source: /note="Description of Artificial Sequence: Synthetic polynucleotide"
gccttgccagcccgctcaggacgttaatggcgtattccctgacagctggctggtggctcatcaggccggagcagctggcccatgtcctggggcactagggaagcttggtcatcctgcagtgcgtggtccgcaccaggatcagctacacccactggtaccagcagaagggccaggtccctgaggcactccaccagctggccatgtccaagttggatgtgcagtgggattccatcctgaaagcagataaaatcatagccaaggatggcagcagctctatcttggcagtactgaagttggagacaggcatcgagggcatgaactactgcacaacctggtgagacgttaatggcgtatgtcgacactggttggttcaagatatttgctgaagggactaagctcatagtaacttcacctggtaagtaacttttctttctgtttttattccagtaatgaaaaactggacgttaatggcgtatctgatggcgcgagggaggc

SEQ ID NO: 1616 - DNA, 495 bp, Artificial Sequence
  source: /note="Description of Artificial Sequence: Synthetic polynucleotide"
gccttgccagcccgctcagacaagatatggcgtatgcaataaaaaatgtcaactacatttttgtcaacagagcaacagataaaagtgtctaggtatcttgtgtggtgtccactgaagactttgtaaatatagttatacactggtaccagcagaaactgaatctaaattatgagccatctgacaactatcacttcaataacaagccccagttcgagtttgcttaggtgagaaaaacaagaaacttgaggcaagaacaaattttcaaatgtctacttcagtctttaccataaacttcataggaaaggaagatgaggccatttactactgcactgctttgaacaagatatggcgtatgtcgacactggttggttcaagatatttgctgaagggactaagctcatagtaacttcacctggtaagtaacttttctttctgtttttattccagtaatgaaaaactgacaagatatggcgtatctgatggcgcgagggaggc

SEQ ID NO: 1617 - DNA, 495 bp, Artificial Sequence
  source: /note="Description of Artificial Sequence: Synthetic polynucleotide"
gccttgccagcccgctcagcaaggtcatggacatgagtcagatatcttccaacttggaagggagaacgaagtcagtcaccaggctgactgggtcatctgctgaaatcacctgtgatcttcctggagcaagtaccttatacatccactggtacctgcaccaggaggggaaggccccacagtgtcttctgtactatgaaccctactactccagggttgtgctggaatcaggaatcactccaggaaagtatgacactggaagcacaaggagcaattggaatttgagactgcaaaatctaattaaaaatgattctgggttctattactgtgccacctggtgacaaggtcatggacatggtcgacagtgattggatcaagacgtttgcaaaagggactaggctcatagtaacttcgcctggtaagtaattttttttctgtttttattccagtaatgaaaaactgacaaggtcatggacatgctgatggcgcgagggaggc

SEQ ID NO: 1618 - DNA, 495 bp, Artificial Sequence
  source: /note="Description of Artificial Sequence: Synthetic polynucleotide"
gccttgccagcccgctcaggcataacttggacatgcagaaatcttccaacttggaagggagaacgaagtcagtcatcaggcagactgggtcatctgctgaaatcacttgtgatcttgctgaaggaagtaacggctacatccactggtacctacaccaggaggggaaggccccacagcgtcttcagtactatgactcctacaactccaaggttgtgttggaatcaggagtcagtccagggaagtattatacttacgcaagcacaaggaacaacttgagattgatactgcgaaatctaattgaaaatgactttggggtctattactgtgccacctggtgagcataacttggacatggtcgacagtgattggatcaagacgtttgcaaaagggactaggctcatagtaacttcgcctggtaagtaattttttttctgtttttattccagtaatgaaaaactgagcataacttggacatgctgatggcgcgagggaggc

SEQ ID NO: 1619 - DNA, 495 bp, Artificial Sequence
  source: /note="Description of Artificial Sequence: Synthetic polynucleotide"
gccttgccagcccgctcagctctgatttggacatgcagaaatcttccaacttggaagggagaacgaagtcagtcaccaggcagactgggtcatctgctgaaatcacttgcgatcttactgtaacaaataccttctacatccactggtacctacaccaggaggggaaggccccacagcgtcttctgtactatgacgtctccaccgcaagggatgtgttggaatcaggactcagtccaggaaagtattatactcatacacccaggaggtggagctggatattgagactgcaaaatctaattgaaaatgattctggggtctattactgtgccacctggtgactctgatttggacatggtcgacagtgattggatcaagacgtttgcaaaagggactaggctcatagtaacttcgcctggtaagtaattttttttctgtttttattccagtaatgaaaaactgactctgatttggacatgctgatggcgcgagggaggc

SEQ ID NO: 1620 - DNA, 495 bp, Artificial Sequence
  source: /note="Description of Artificial Sequence: Synthetic polynucleotide"
gccttgccagcccgctcagtacgtacgtggacatgcagaaatcttccaacttggaagggagaacgaagtcagtcatcaggcagactgggtcatctgctgaaatcacttgtgatcttgctgaaggaagtaccggctacatccactggtacctacaccaggaggggaaggccccacagcgtcttctgtactatgactcctacacctccagcgttgtgttggaatcaggaatcagcccagggaagtatgatacttacggaagcacaaggaagaacttgagaatgatactgcgaaatcttattgaaaatgactctggagtctattactgtgccacctggtgatacgtacgtggacatggtcgacagtgattggatcaagacgtttgcaaaagggactaggctcatagtaacttcgcctggtaagtaattttttttctgtttttattccagtaatgaaaaactgatacgtacgtggacatgctgatggcgcgagggaggc

SEQ ID NO: 1621 - DNA, 495 bp, Artificial Sequence
  source: /note="Description of Artificial Sequence: Synthetic polynucleotide"
gccttgccagcccgctcagtacgcgtttggacatgcagaaatcttccaacttggaagggggaacgaagtcagtcacgaggccgactaggtcatctgctgaaatcacttgtgaccttactgtaataaatgccttctacatccactggtacctacaccaggaggggaaggccccacagcgtcttctgtactatgacgtctccaactcaaaggatgtgttggaatcaggactcagtccaggaaagtattatactcatacacccaggaggtggagctggatattgatactacgaaatctaattgaaaatgattctggggtctattactgtgccacctggtgatacgcgtttggacatggtcgacagtgattggatcaagacgtttgcaaaagggactaggctcatagtaacttcgcctggtaagtaattttttttctgtttttattccagtaatgaaaaactgatacgcgtttggacatgctgatggcgcgagggaggc

SEQ ID NO: 1622 - DNA, 495 bp, Artificial Sequence
  source: /note="Description of Artificial Sequence: Synthetic polynucleotide"
gccttgccagcccgctcagctcagtgatggacatgcagaaatcttccaacttggaagggagaatgaagtcagtcaccaggccgactgggtcatctgctgaaatcacttgtgaccttactgtaataaatgccgtctacatccactggtacctacagcaggaggggaagaccccacagcatcttctgcactatgatgtctccaactcaagggatgtgttggaatcaggtctcagtcttggaaagtattatactcatacaccgaggaggtggagctggaatttgagactgcaaaatctaattgaaaatgattctggggtctattactgtgccacctggtgactcagtgatggacatggtcgacagtgattggatcaagacgtttgcaaaagggactaggctcatagtaacttcgcctggtaagtaattttttttctgtttttattccagtaatgaaaaactgactcagtgatggacatgctgatggcgcgagggaggc

SEQ ID NO: 1623 - DNA, 495 bp, Artificial Sequence
  source: /note="Description of Artificial Sequence: Synthetic polynucleotide"
gccttgccagcccgctcagtctgatattggacatgagtcagatatctactaacttggaagcgaaaataaagtcaggcaccaggcagatggggtcatctgctgtaatcacctgtgatcttcctgtagaaaatgccttctacatccactggtacctacgccaggaggggaaggccccacagcatcttctgtactatgacatctgcaactccagggatatgttggaatcaggagtcagtcaggaaagcatgatacttatggaagtagaaggataagctggaaatttatacctccaaaactaaatgaaaatgcctctggggtctattactgtgccaccttgatctgatattggacatggtcgacagtgattggatcaagacgtttgcaaaagggactaggctcatagtaacttcgcctggtaagtaattttttttctgtttttattccagtaatgaaaaactgatctgatattggacatgctgatggcgcgagggaggc

SEQ ID NO: 1624 - DNA, 495 bp, Artificial Sequence
  source: /note="Description of Artificial Sequence: Synthetic polynucleotide"
gccttgccagcccgctcagcatatgcttggacatgagtcagaaatcttccaacttgcaagggagaaggaagtcagtcaccaggccagctgggtcatctgctgtaatcacttgtgatcttactgtaataaataccttctacatccactggtacctgcaccaggcggggaaggccccacagcatcttccatactatgacccctactactccagggttgtgttggaatcaagaatcagtagaggaaagtattttacttatgcaagcatgaggaggagctggaaattgatactgcaaaatctaattgaaaatgattctggatctattactgtgccaccttgacatatgcttggacatggtcgacagtgattggatcaagacgtttgcaaaagggactaggctcatagtaacttcgcctggtaagtaattttttttctgtttttattccagtaatgaaaaactgacatatgcttggacatgctgatggcgcgagggaggc

SEQ ID NO: 1625 - DNA, 495 bp, Artificial Sequence
  source: /note="Description of Artificial Sequence: Synthetic polynucleotide"
gccttgccagcccgctcagcgtaattatggacatgcagaaatcttccaacttggaagggagaacaaagtcagtcaccaggccaactgggtcatcagctgtaatcacttgtgatcttcctgtagaaaatgccgtctacacccactggtacctacaccaggaggggaaggccccacagcgtcttctgtactatgactcctacaactccagggttgtgttggaatcaggaatcagtcgagaaaagtatcatacttatgcaagcacagggaagagccttaaatttatactggaaaatctaattgaacgtgactctggggtctattactgtgccacctggtgacgtaattatggacatggtcgacagtgattggatcaagacgtttgcaaaagggactaggctcatagtaacttcgcctggtaagtaattttttttctgtttttattccagtaatgaaaaactgacgtaattatggacatgctgatggcgcgagggaggc

SEQ ID NO: 1626 - DNA, 495 bp, Artificial Sequence
  source: /note="Description of Artificial Sequence: Synthetic polynucleotide"
gccttgccagcccgctcagacgtactctggacatggcaggtcacctagagcaacctcaaatttccagtactaaaacgctgtcaaaaacagcccgcctggaatgtgtggtgtctggaataacaatttctgcaacatctgtatattggtatcgagagagacctggtgaagtcatacagttcctggtgtccatttcatatgacggcactgtcagaaaggaatccggcattccgtcaggcaaatttgaggtggataggatacctgaaacgtctacatccactctcaccattcacaatgtagagaaacaggacatagctacctactactgtgccttgtggtgaacgtactctggacatggtcgacagtgattggatcaagacgtttgcaaaagggactaggctcatagtaacttcgcctggtaagtaattttttttctgtttttattccagtaatgaaaaactgaacgtactctggacatgctgatggcgcgagggaggc

SEQ ID NO: 1627 - DNA, 495 bp, Artificial Sequence
  source: /note="Description of Artificial Sequence: Synthetic polynucleotide"
gccttgccagcccgctcagcttctaagtggacatgttatcaaaagtggagcagttccagctatccatttccacggaagtcaagaaaagtattgacataccttgcaagatatcgagcacaaggtttgaaacagatgtcattcactggtaccggcagaaaccaaatcaggctttggagcacctgatctatattgtctcaacaaaatccgcagctcgacgcagcatgggtaagacaagcaacaaagtggaggcaagaaagaattctcaaactctcacttcaatccttaccatcaagtccgtagagaaagaagacatggccgtttactactgtgctgcgtgacttctaagtggacatggtcgacagtgattggatcaagacgtttgcaaaagggactaggctcatagtaacttcgcctggtaagtaattttttttctgtttttattccagtaatgaaaaactgacttctaagtggacatgctgatggcgcgagggaggc

SEQ ID NO: 1628 - DNA, 495 bp, Artificial Sequence
  source: /note="Description of Artificial Sequence: Synthetic polynucleotide"
gccttgccagcccgctcagactatgactggacatggggcagttggaacaacctgaaatatctatttccagaccagcaaataagagtgcccacatatcttggaaggcatccatccaaggctttagcagtaaaatcatacactggtactggcagaaaccaaacaaaggcttagaatatttattacatgtcttcttgacaatctctgctcaagattgctcaggtgggaagactaagaaacttgaggtaagtaaaaatgctcacacttccacttccactttgaaaataaagttcttagagaaagaagatgaggtggtgtaccactgtgcctgctggatttgaactatgactggacatggtcgacagtgattggatcaagacgtttgcaaaagggactaggctcatagtaacttcgcctggtaagtaattttttttctgtttttattccagtaatgaaaaactgaactatgactggacatgctgatggcgcgagggaggc

SEQ ID NO: 1629 - DNA, 495 bp, Artificial Sequence
  source: /note="Description of Artificial Sequence: Synthetic polynucleotide"
gccttgccagcccgctcaggacgttaatggacatgtccctgacagctggctggtggctcatcaggccggagcagctggcccatgtcctggggcactagggaagcttggtcatcctgcagtgcgtggtccgcaccaggatcagctacacccactggtaccagcagaagggccaggtccctgaggcactccaccagctggccatgtccaagttggatgtgcagtgggattccatcctgaaagcagataaaatcatagccaaggatggcagcagctctatcttggcagtactgaagttggagacaggcatcgagggcatgaactactgcacaacctggtgagacgttaatggacatggtcgacagtgattggatcaagacgtttgcaaaagggactaggctcatagtaacttcgcctggtaagtaattttttttctgtttttattccagtaatgaaaaactgagacgttaatggacatgctgatggcgcgagggaggc

SEQ ID NO: 1630 - DNA, 495 bp, Artificial Sequence
  source: /note="Description of Artificial Sequence: Synthetic polynucleotide"
gccttgccagcccgctcagacaagatatggacatggcaataaaaaatgtcaactacatttttgtcaacagagcaacagataaaagtgtctaggtatcttgtgtggtgtccactgaagactttgtaaatatagttatacactggtaccagcagaaactgaatctaaattatgagccatctgacaactatcacttcaataacaagccccagttcgagtttgcttaggtgagaaaaacaagaaacttgaggcaagaacaaattttcaaatgtctacttcagtctttaccataaacttcataggaaaggaagatgaggccatttactactgcactgctttgaacaagatatggacatggtcgacagtgattggatcaagacgtttgcaaaagggactaggctcatagtaacttcgcctggtaagtaattttttttctgtttttattccagtaatgaaaaactgaacaagatatggacatgctgatggcgcgagggaggc

SEQ ID NO: 1631 - DNA, 35 bp, Artificial Sequence
  source: /note="Description of Artificial Sequence: Synthetic primer"
ttacctacaactgtgagtctggtgccttgtccaaa

SEQ ID NO: 1632 - DNA, 33 bp, Artificial Sequence
  source: /note="Description of Artificial Sequence: Synthetic primer"
acctacaacggttaacctggtccccgaaccgaa

SEQ ID NO: 1633 - DNA, 33 bp, Artificial Sequence
  source: /note="Description of Artificial Sequence: Synthetic primer"
acctacaacagtgagccaacttccctctccaaa

SEQ ID NO: 1634 - DNA, 31 bp, Artificial Sequence
  source: /note="Description of Artificial Sequence: Synthetic primer"
ccaagacagagagctgggttccactgccaaa

SEQ ID NO: 1635 - DNA, 33 bp, Artificial Sequence
  source: /note="Description of Artificial Sequence: Synthetic primer"
acctaggatggagagtcgagtcccatcaccaaa

SEQ ID NO: 1636 - DNA, 31 bp, Artificial Sequence
  source: /note="Description of Artificial Sequence: Synthetic primer"
ctgtcacagtgagcctggtcccgttcccaaa

SEQ ID NO: 1637 - DNA, 25 bp, Artificial Sequence
  source: /note="Description of Artificial Sequence: Synthetic primer"
cggtgagccgtgtccctggcccgaa

SEQ ID NO: 1638 - DNA, 31 bp, Artificial Sequence
  source: /note="Description of Artificial Sequence: Synthetic primer"
ccagtacggtcagcctagagccttctccaaa

SEQ ID NO: 1639 - DNA, 26 bp, Artificial Sequence
  source: /note="Description of Artificial Sequence: Synthetic primer"
actgtcagccgggtgcctgggccaaa

SEQ ID NO: 1640 - DNA, 22 bp, Artificial Sequence
  source: /note="Description of Artificial Sequence: Synthetic primer"
agagccgggtcccggcgccgaa

SEQ ID NO: 1641 - DNA, 22 bp, Artificial Sequence
  source: /note="Description of Artificial Sequence: Synthetic primer"
ggagccgcgtgcctggcccgaa

SEQ ID NO: 1642 - DNA, 23 bp, Artificial Sequence
  source: /note="Description of Artificial Sequence: Synthetic primer"
gtcagcctgctgccggccccgaa

SEQ ID NO: 1643 - DNA, 23 bp, Artificial Sequence
  source: /note="Description of Artificial Sequence: Synthetic primer"
gtgagcctggtgcccggcccgaa

SEQ ID NO: 1644 - DNA, 29 bp, Artificial Sequence
  source: /note="Description of Artificial Sequence: Synthetic primer"
aacaaaggagaagtctcagatggctacag

SEQ ID NO: 1645 - DNA, 29 bp, Artificial Sequence
  source: /note="Description of Artificial Sequence: Synthetic primer"
gataaaggagaagtccccgatggctatgt

SEQ ID NO: 1646 - DNA, 29 bp, Artificial Sequence
  source: /note="Description of Artificial Sequence: Synthetic primer"
gacaaaggagaagtctcagatggctatag

SEQ ID NO: 1647 - DNA, 29 bp, Artificial Sequence
  source: /note="Description of Artificial Sequence: Synthetic primer"
gccaaaggagaggtccctgatggctacaa

SEQ ID NO: 1648 - DNA, 29 bp, Artificial Sequence
  source: /note="Description of Artificial Sequence: Synthetic primer"
ctctagattaaacacagaggatttcccac

SEQ ID NO: 1649 - DNA, 29 bp, Artificial Sequence
  source: /note="Description of Artificial Sequence: Synthetic primer"
aaggagaagtccccgatggctacaatgta

SEQ ID NO: 1650 - DNA, 29 bp, Artificial Sequence
  source: /note="Description of Artificial Sequence: Synthetic primer"
aaggagaagtccccaatggctacaatgtc

SEQ ID NO: 1651 - DNA, 30 bp, Artificial Sequence
  source: /note="Description of Artificial Sequence: Synthetic primer"
gacaaaggagaagtcccgaatggctacaac

SEQ ID NO: 1652 - DNA, 29 bp, Artificial Sequence
  source: /note="Description of Artificial Sequence: Synthetic primer"
gttcccaatggctacaatgtctccagatc

SEQ ID NO: 1653 - DNA, 29 bp, Artificial Sequence
  source: /note="Description of Artificial Sequence: Synthetic primer"
gtccccaatggctacaatgtctccagatt

SEQ ID NO: 1654 - DNA, 29 bp, Artificial Sequence
  source: /note="Description of Artificial Sequence: Synthetic primer"
gtccctgatggttatagtgtctccagagc

SEQ ID NO: 1655 - DNA, 29 bp, Artificial Sequence
  source: /note="Description of Artificial Sequence: Synthetic primer"
atctctgatggatacagtgtctctcgaca

SEQ ID NO: 1656 - DNA, 29 bp, Artificial Sequence
  source: /note="Description of Artificial Sequence: Synthetic primer"
tttcctctgagtcaacagtctccagaata

SEQ ID NO: 1657 - DNA, 29 bp, Artificial Sequence
  source: /note="Description of Artificial Sequence: Synthetic primer"
tcctgaagggtacaaagtctctcgaaaag

SEQ ID NO: 1658 - DNA, 29 bp, Artificial Sequence
  source: /note="Description of Artificial Sequence: Synthetic primer"
ctctgagaggtatcatgtttcttgaaata

SEQ ID NO: 1659 - DNA, 29 bp, Artificial Sequence
  source: /note="Description of Artificial Sequence: Synthetic primer"
tcctgaggggtacagtgtctctagagaga

SEQ ID NO: 1660 - DNA, 29 bp, Artificial Sequence
  source: /note="Description of Artificial Sequence: Synthetic primer"
tatagctgaagggtacagcgtctctcggg

SEQ ID NO: 1661 - DNA, 29 bp, Artificial Sequence
  source: /note="Description of Artificial Sequence: Synthetic primer"
ctgaatgccccaacagctctctcttaaac

SEQ ID NO: 1662 - DNA, 29 bp, Artificial Sequence
  source: /note="Description of Artificial Sequence: Synthetic primer"
ctgaatgccccaacagctctcacttattc

SEQ ID NO: 1663 - DNA, 29 bp, Artificial Sequence
  source: /note="Description of Artificial Sequence: Synthetic primer"
cctgaatgccctgacagctctcgcttata

SEQ ID NO: 1664 - DNA, 29 bp, Artificial Sequence
  source: /note="Description of Artificial Sequence: Synthetic primer"
cctaaatctccagacaaagctcacttaaa

SEQ ID NO: 1665 - DNA, 28 bp, Artificial Sequence
  source: /note="Description of Artificial Sequence: Synthetic primer"
ctcacctgactctccagacaaagctcat

SEQ ID NO: 1666 - DNA, 29 bp, Artificial Sequence
  source: /note="Description of Artificial Sequence: Synthetic primer"
ttcagctaagtgcctcccaaattcaccct

SEQ ID NO: 1667 - DNA, 28 bp, Artificial Sequence
  source: /note="Description of Artificial Sequence: Synthetic primer"
gattctcatctcaatgccccaagaacgc

SEQ ID NO: 1668 - DNA, 29 bp, Artificial Sequence
  source: /note="Description of Artificial Sequence: Synthetic primer"
attttctgctgaatttcccaaagagggcc

SEQ ID NO: 1669 - DNA, 29 bp, Artificial Sequence
  source: /note="Description of Artificial Sequence: Synthetic primer"
attcacagctgaaagacctaacggaacgt

SEQ ID NO: 1670 - DNA, 29 bp, Artificial Sequence
  source: /note="Description of Artificial Sequence: Synthetic primer"
tcttagctgaaaggactggagggacgtat

SEQ ID NO: 1671 - DNA, 29 bp, Artificial Sequence
  source: /note="Description of Artificial Sequence: Synthetic primer"
ttcgatgatcaattctcagttgaaaggcc

SEQ ID NO: 1672 - DNA, 27 bp, Artificial Sequence
  source: /note="Description of Artificial Sequence: Synthetic primer"
ttgattctcagcacagatgcctgatgt

SEQ ID NO: 1673 - DNA, 27 bp, Artificial Sequence
  source: /note="Description of Artificial Sequence: Synthetic primer"
gcgattctcagctgagaggcctgatgg

SEQ ID NO: 1674 - DNA, 27 bp, Artificial Sequence
  source: /note="Description of Artificial Sequence: Synthetic primer"
tcgattctcagctaagatgcctaatgc

SEQ ID NO: 1675 - DNA, 30 bp, Artificial Sequence
  source: /note="Description of Artificial Sequence: Synthetic primer"
ttctcagcagagatgcctgatgcaacttta

SEQ ID NO: 1676 - DNA, 29 bp, Artificial Sequence
  source: /note="Description of Artificial Sequence: Synthetic primer"
ggttctctgcagagaggcctaagggatct

SEQ ID NO: 1677 - DNA, 29 bp, Artificial Sequence
  source: /note="Description of Artificial Sequence: Synthetic primer"
gctgcccagtgatcgcttctttgcagaaa

SEQ ID NO: 1678 - DNA, 29 bp, Artificial Sequence
  source: /note="Description of Artificial Sequence: Synthetic primer"
ggcggcccagtggtcggttctctgcagag

SEQ ID NO: 1679 - DNA, 30 bp, Artificial Sequence
  source: /note="Description of Artificial Sequence: Synthetic primer"
atgatcggttctctgcagagaggcctgagg

SEQ ID NO: 1680 - DNA, 29 bp, Artificial Sequence
  source: /note="Description of Artificial Sequence: Synthetic primer"
agtgatcgcttctctgcagagaggactgg

SEQ ID NO: 1681 - DNA, 28 bp, Artificial Sequence
  source: /note="Description of Artificial Sequence: Synthetic primer"
ggctgcccaacgatcggttctttgcagt

SEQ ID NO: 1682 - DNA, 29 bp, Artificial Sequence
  source: /note="Description of Artificial Sequence: Synthetic primer"
tccccgtgatcggttctctgcacagaggt

SEQ ID NO: 1683 - DNA, 29 bp, Artificial Sequence
  source: /note="Description of Artificial Sequence: Synthetic primer"
ctaaggatcgattttctgcagagaggctc

SEQ ID NO: 1684 - DNA, 29 bp, Artificial Sequence
  source: /note="Description of Artificial Sequence: Synthetic primer"
ctgatcgattctcagctcaacagttcagt

SEQ ID NO: 1685 - DNA, 29 bp, Artificial Sequence
  source: /note="Description of Artificial Sequence: Synthetic primer"
tggtcgattctcagggcgccagttctcta

SEQ ID NO: 1686 - DNA, 29 bp, Artificial Sequence
  source: /note="Description of Artificial Sequence: Synthetic primer"
taatcgattctcagggcgccagttccatg

SEQ ID NO: 1687 - DNA, 29 bp, Artificial Sequence
  source: /note="Description of Artificial Sequence: Synthetic primer"
tcctagattctcaggtctccagttcccta

SEQ ID NO: 1688 - DNA, 29 bp, Artificial Sequence
  source: /note="Description of Artificial Sequence: Synthetic primer"
ggaaacttccctcctagattttcaggtcg

SEQ ID NO: 1689 - DNA, 30 bp, Artificial Sequence
  source: /note="Description of Artificial Sequence: Synthetic primer"
aagaggaaacttccctgatcgattctcagc

SEQ ID NO: 1690 - DNA, 29 bp, Artificial Sequence
  source: /note="Description of Artificial Sequence: Synthetic primer"
ggcaacttccctgatcgattctcaggtca

SEQ ID NO: 1691 - DNA, 28 bp, Artificial Sequence
  source: /note="Description of Artificial Sequence: Synthetic primer"
gttccctgacttgcactctgaactaaac

SEQ ID NO: 1692 - DNA, 28 bp, Artificial Sequence
  source: /note="Description of Artificial Sequence: Synthetic primer"
gccgaacacttctttctgctttcttgac

SEQ ID NO: 1693 - DNA, 29 bp, Artificial Sequence
  source: /note="Description of Artificial Sequence: Synthetic primer"
gaccccaggaccggcagttcatcctgagt

SEQ ID NO: 1694 - DNA, 29 bp, Artificial Sequence
  source: /note="Description of Artificial Sequence: Synthetic primer"
atgcaagcctgaccttgtccactctgaca

SEQ ID NO: 1695 - DNA, 29 bp, Artificial Sequence
  source: /note="Description of Artificial Sequence: Synthetic primer"
catcagccgcccaaacctaacattctcaa

SEQ ID NO: 1696 - DNA, 33 bp, Artificial Sequence
  source: /note="Description of Artificial Sequence: Synthetic primer"
acaactgtgagtctggtgccttgtccaaagaaa

SEQ ID NO: 1697 - DNA, 33 bp, Artificial Sequence
  source: /note="Description of Artificial Sequence: Synthetic primer"
acaacggttaacctggtccccgaaccgaaggtg

SEQ ID NO: 1698 - DNA, 33 bp, Artificial Sequence
  source: /note="Description of Artificial Sequence: Synthetic primer"
acaacagtgagccaacttccctctccaaaatat

SEQ ID NO: 1699 - DNA, 33 bp, Artificial Sequence
  source: /note="Description of Artificial Sequence: Synthetic primer"
aagacagagagctgggttccactgccaaaaaac

SEQ ID NO: 1700 - DNA, 33 bp, Artificial Sequence
  source: /note="Description of Artificial Sequence: Synthetic primer"
aggatggagagtcgagtcccatcaccaaaatgc

SEQ ID NO: 1701 - DNA, 33 bp, Artificial Sequence
  source: /note="Description of Artificial Sequence: Synthetic primer"
gtcacagtgagcctggtcccgttcccaaagtgg

SEQ ID NO: 1702 - DNA, 33 bp, Artificial Sequence
  source: /note="Description of Artificial Sequence: Synthetic primer"
agcacggtgagccgtgtccctggcccgaagaac

SEQ ID NO: 1703 - DNA, 33 bp, Artificial Sequence
  source: /note="Description of Artificial Sequence: Synthetic primer"
agtacggtcagcctagagccttctccaaaaaac

SEQ ID NO: 1704 - DNA, 33 bp, Artificial Sequence
  source: /note="Description of Artificial Sequence: Synthetic primer"
agcactgtcagccgggtgcctgggccaaaatac

SEQ ID NO: 1705 - DNA, 33 bp, Artificial Sequence
  source: /note="Description of Artificial Sequence: Synthetic primer"
agcactgagagccgggtcccggcgccgaagtac

SEQ ID NO: 1706 - DNA, 33 bp, Artificial Sequence
  source: /note="Description of Artificial Sequence: Synthetic primer"
agcaccaggagccgcgtgcctggcccgaagtac

SEQ ID NO: 1707 - DNA, 33 bp, Artificial Sequence
  source: /note="Description of Artificial Sequence: Synthetic primer"
agcacggtcagcctgctgccggccccgaaagtc

SEQ ID NO: 1708 - DNA, 33 bp, Artificial Sequence
  source: /note="Description of Artificial Sequence: Synthetic primer"
gtgaccgtgagcctggtgcccggcccgaagtac

SEQ ID NO: 1709 - DNA, 33 bp, Artificial Sequence; identical to SEQ ID NO: 1708
  source: /note="Description of Artificial Sequence: Synthetic oligonucleotide"

SEQ ID NO: 1710 - DNA, 18 bp, Artificial Sequence
  source: /note="Description of Artificial Sequence: Synthetic oligonucleotide"
aatacgactcactatagg

SEQ ID NO: 1711 - DNA, 19 bp, Artificial Sequence
  source: /note="Description of Artificial Sequence: Synthetic oligonucleotide"
gctagttattgctcagcgg

SEQ ID NO: 1712 - DNA, 18 bp, Artificial Sequence
  source: /note="Description of Artificial Sequence: Synthetic oligonucleotide"
attaaccctcactaaagg

SEQ ID NO: 1713 - DNA, 19 bp, Artificial Sequence
  source: /note="Description of Artificial Sequence: Synthetic oligonucleotide"
gatttaggtgacactatag

SEQ ID NO: 1714 - DNA, 18 bp, Artificial Sequence
  source: /note="Description of Artificial Sequence: Synthetic oligonucleotide"
tgtaaaacgacggccagt

SEQ ID NO: 1715 - DNA, 17 bp, Artificial Sequence
  source: /note="Description of Artificial Sequence: Synthetic oligonucleotide"
gttttcccagtcacgac

SEQ ID NO: 1716 - DNA, 18 bp, Artificial Sequence
  source: /note="Description of Artificial Sequence: Synthetic oligonucleotide"
caggaaacagctatgacc

SEQ ID NO: 1717 - DNA, 21 bp, Artificial Sequence
  source: /note="Description of Artificial Sequence: Synthetic oligonucleotide"
gactggttccaattgacaagc

SEQ ID NO: 1718 - DNA, 21 bp, Artificial Sequence
  source: /note="Description of Artificial Sequence: Synthetic oligonucleotide"
gcaaatggcattctgacatcc

SEQ ID NO: 1719 - DNA, 23 bp, Artificial Sequence
  source: /note="Description of Artificial Sequence: Synthetic oligonucleotide"
gggctggcaagccacgtttggtg

SEQ ID NO: 1720 - DNA, 23 bp, Artificial Sequence
  source: /note="Description of Artificial Sequence: Synthetic oligonucleotide"
ccgggagctgcatgtgtcagagg

SEQ ID NO: 1721 - DNA, 22 bp, Artificial Sequence
  source: /note="Description of Artificial Sequence: Synthetic oligonucleotide"
aactagaaggcacagtcgaggc

SEQ ID NO: 1722 - DNA, 20 bp, Artificial Sequence
  source: /note="Description of Artificial Sequence: Synthetic oligonucleotide"
cactctcggcatggacgagc

SEQ ID NO: 1723 - DNA, 20 bp, Artificial Sequence
  source: /note="Description of Artificial Sequence: Synthetic oligonucleotide"
tggtgcagatgaacttcagg

SEQ ID NO: 1724 - DNA, 20 bp, Artificial Sequence
  source: /note="Description of Artificial Sequence: Synthetic oligonucleotide"
gttcgaccccgcctcgatcc

SEQ ID NO: 1725 - DNA, 21 bp, Artificial Sequence
  source: /note="Description of Artificial Sequence: Synthetic oligonucleotide"
tgacacacattccacagggtc

SEQ ID NO: 1726 - DNA, 19 bp, Artificial Sequence
  source: /note="Description of Artificial Sequence: Synthetic oligonucleotide"
gcgtgaatgtaagcgtgac

SEQ ID NO: 1727 - DNA, 20 bp, Artificial Sequence
  source: /note="Description of Artificial Sequence: Synthetic oligonucleotide"
ggattattcataccgtccca

SEQ ID NO: 1728 - DNA, 20 bp, Artificial Sequence
  source: /note="Description of Artificial Sequence: Synthetic oligonucleotide"
caaatgtggtatggctgatt

SEQ ID NO: 1729 - DNA, 20 bp, Artificial Sequence
  source: /note="Description of Artificial Sequence: Synthetic oligonucleotide"
atgccatagcatttttatcc

SEQ ID NO: 1730 - DNA, 18 bp, Artificial Sequence
  source: /note="Description of Artificial Sequence: Synthetic oligonucleotide"
gatttaatctgtatcagg

SEQ ID NO: 1731 - DNA, 21 bp, Artificial Sequence
  source: /note="Description of Artificial Sequence: Synthetic oligonucleotide"
cgcaaatgggcggtaggcgtg

SEQ ID NO: 1732 - DNA, 26 bp, Artificial Sequence
  source: /note="Description of Artificial Sequence: Synthetic oligonucleotide"
ggaggggaaggccccacagtgtcttc

SEQ ID NO: 1733 - DNA, 26 bp, Artificial Sequence
  source: /note="Description of Artificial Sequence: Synthetic oligonucleotide"
ggaggggaaggccccacagcgtcttc

SEQ ID NO: 1734 - DNA, 26 bp, Artificial Sequence
  source: /note="Description of Artificial Sequence: Synthetic oligonucleotide"
ggaggggaagaccccacagcatcttc

SEQ ID NO: 1735 - DNA, 26 bp, Artificial Sequence
  source: /note="Description of Artificial Sequence: Synthetic oligonucleotide"
ggaggggaaggccccacagcatcttc

SEQ ID NO: 1736 - DNA, 26 bp, Artificial Sequence
  source: /note="Description of Artificial Sequence: Synthetic oligonucleotide"
ggcggggaaggccccacagcatcttc

SEQ ID NO: 1737 - DNA, 27 bp, Artificial Sequence
  source: /note="Description of Artificial Sequence: Synthetic oligonucleotide"
tgaagtcatacagttcctggtgtccat

SEQ ID NO: 1738 - DNA, 28 bp, Artificial Sequence
  source: /note="Description of Artificial Sequence: Synthetic oligonucleotide"
ccaaatcaggctttggagcacctgatct

SEQ ID NO: 1739 - DNA, 27 bp, Artificial Sequence
  source: /note="Description of Artificial Sequence: Synthetic oligonucleotide"
caaaggcttagaatatttattacatgt

SEQ ID NO: 1740 - DNA, 27 bp, Artificial Sequence
  source: /note="Description of Artificial Sequence: Synthetic oligonucleotide"
ccaggtccctgaggcactccaccagct

SEQ ID NO: 1741 - DNA, 28 bp, Artificial Sequence
  source: /note="Description of Artificial Sequence: Synthetic oligonucleotide"
ctgaatctaaattatgagccatctgaca

SEQ ID NO: 1742 - DNA, 34 bp, Artificial Sequence
  source: /note="Description of Artificial Sequence: Synthetic oligonucleotide"
gtgaagttactatgagcttagtcccttcagcaaa

SEQ ID NO: 1743 - DNA, 33 bp, Artificial Sequence
  source: /note="Description of Artificial Sequence: Synthetic oligonucleotide"
cgaagttactatgagcctagtcccttttgcaaa

SEQ ID NO: 1744 - DNA, 28 bp, Artificial Sequence
  source: /note="Description of Artificial Sequence: Synthetic oligonucleotide"
tgacaacaagtgttgttccactgccaaa

SEQ ID NO: 1745 - DNA, 31 bp, Artificial Sequence
  source: /note="Description of Artificial Sequence: Synthetic oligonucleotide"
ctgtaatgataagctttgttccgggaccaaa

SEQ ID NO: 1746 - DNA, 19 bp, Artificial Sequence
  source: /note="Description of Artificial Sequence: Synthetic oligonucleotide"
gccttgccagcccgctcag

SEQ ID NO: 1747 - DNA, 49 bp, Artificial Sequence
  source: /note="Description of Artificial Sequence: Synthetic oligonucleotide"
caagcagaagacggcatacgagatcggtctgccttgccagcccgctcag

SEQ ID NO: 1748 - DNA, 16 bp, Artificial Sequence
  source: /note="Description of Artificial Sequence: Synthetic oligonucleotide"
acacacgtgacactct

SEQ ID NO: 1749 - DNA, 300 bp, Artificial Sequence
  source: /note="Description of Artificial Sequence: Synthetic polynucleotide"
tcttattttcataggctccatggatactggaattacccagacaccaaaatacctggtcacagcaatggggagtaaaaggacaatgaaacgtgagcatctgggacatgattctatgtattggtacagacagaaagctaagaaatccctggagttcatgttttactacaactgtaaggaattcattgaaaacaagactgtgccaaatcacttcacacctgaatgccctgacagctctcgcttataccttcatgtggtcgcactgcagcaagaagactcagctgcgtatctctgcaccagcag

SEQ ID NO: 1750 - DNA, 100 bp, Artificial Sequence
  source: /note="Description of Artificial Sequence: Synthetic polynucleotide"
actgaagctttctttggacaaggcaccagactcacagttgtaggtaagacatttttcaggttcttttgcagatccgtcacagggaaaagtgggtccacag

SEQ ID NO: 1751 - DNA, 19 bp, Artificial Sequence
  source: /note="Description of Artificial Sequence: Synthetic oligonucleotide"
ctgatggcgcgagggaggc

SEQ ID NO: 1752 - DNA, 48 bp, Artificial Sequence
  source: /note="Description of Artificial Sequence: Synthetic oligonucleotide"
aatgatacggcgaccaccgagatctacacgcctccctcgcgccatcag

SEQ ID NO: 1753 - DNA, 63 bp, Artificial Sequence
  source: /note="Description of Artificial Sequence: Synthetic oligonucleotide"
caagcagaagacggcatacgagctcttccgatctaacaaaggagaagtctcagatggctacag

SEQ ID NO: 1754 - DNA, 63 bp, Artificial Sequence
  source: /note="Description of Artificial Sequence: Synthetic oligonucleotide"
caagcagaagacggcatacgagctcttccgatctgataaaggagaagtccccgatggctatgt

SEQ ID NO: 1755 - DNA, 63 bp, Artificial Sequence
  source: /note="Description of Artificial Sequence: Synthetic oligonucleotide"
caagcagaagacggcatacgagctcttccgatctgacaaaggagaagtctcagatggctatag

SEQ ID NO: 1756 - DNA, 63 bp, Artificial Sequence
  source: /note="Description of Artificial Sequence: Synthetic oligonucleotide"
caagcagaagacggcatacgagctcttccgatctctaaggatcgattttctgcagagaggctc

SEQ ID NO: 1757 - DNA, 61 bp, Artificial Sequence
  source: /note="Description of Artificial Sequence: Synthetic oligonucleotide"
caagcagaagacggcatacgagctcttccgatctttgattctcagcacagatgcctgatgt

SEQ ID NO: 1758 - DNA, 61 bp, Artificial Sequence
  source: /note="Description of Artificial Sequence: Synthetic oligonucleotide"
caagcagaagacggcatacgagctcttccgatctgcgattctcagctgagaggcctgatgg

SEQ ID NO: 1759 - DNA, 61 bp, Artificial Sequence
  source: /note="Description of Artificial Sequence: Synthetic oligonucleotide"
caagcagaagacggcatacgagctcttccgatcttcgattctcagctaagatgcctaatgc

SEQ ID NO: 1760 - DNA, 64 bp, Artificial Sequence
  source: /note="Description of Artificial Sequence: Synthetic oligonucleotide"
caagcagaagacggcatacgagctcttccgatctttctcagcagagatgcctgatgcaacttta

SEQ ID NO: 1761 - DNA, 63 bp, Artificial Sequence
  source: /note="Description of Artificial Sequence: Synthetic oligonucleotide"
caagcagaagacggcatacgagctcttccgatctctgatcgattctcagctcaacagttcagt

SEQ ID NO: 1762 - DNA, 63 bp, Artificial Sequence
  source: /note="Description of Artificial Sequence: Synthetic oligonucleotide"
caagcagaagacggcatacgagctcttccgatcttcttagctgaaaggactggagggacgtat

SEQ ID NO: 1763 - DNA, 62 bp, Artificial Sequence
  source: /note="Description of Artificial Sequence: Synthetic oligonucleotide"
caagcagaagacggcatacgagctcttccgatctgccgaacacttctttctgctttcttgac

SEQ ID NO: 1764 - DNA, 63 bp, Artificial Sequence
  source: /note="Description of Artificial Sequence: Synthetic oligonucleotide"
caagcagaagacggcatacgagctcttccgatctttcagctaagtgcctcccaaattcaccct

SEQ ID NO: 1765 - DNA, 63 bp, Artificial Sequence
  source: /note="Description of Artificial Sequence: Synthetic oligonucleotide"
caagcagaagacggcatacgagctcttccgatctattcacagctgaaagacctaacggaacgt

SEQ ID NO: 1766 - DNA, 63 bp, Artificial Sequence
  source: /note="Description of Artificial Sequence: Synthetic oligonucleotide"
caagcagaagacggcatacgagctcttccgatctattttctgctgaatttcccaaagagggcc

SEQ ID NO: 1767 - DNA, 63 bp, Artificial Sequence
  source: /note="Description of Artificial Sequence: Synthetic oligonucleotide"
caagcagaagacggcatacgagctcttccgatcttatagctgaagggtacagcgtctctcggg

SEQ ID NO: 1768 - DNA, 63 bp, Artificial Sequence
  source: /note="Description of Artificial Sequence: Synthetic oligonucleotide"
caagcagaagacggcatacgagctcttccgatctttcgatgatcaattctcagttgaaaggcc

SEQ ID NO: 1769 - DNA, 63 bp, Artificial Sequence
  source: /note="Description of Artificial Sequence: Synthetic oligonucleotide"
caagcagaagacggcatacgagctcttccgatctatgcaagcctgaccttgtccactctgaca

SEQ ID NO: 1770 - DNA, 62 bp, Artificial Sequence
  source: /note="Description of Artificial Sequence: Synthetic oligonucleotide"
caagcagaagacggcatacgagctcttccgatctgattctcatctcaatgccccaagaacgc

SEQ ID NO: 1771 - DNA, 63 bp, Artificial Sequence
  source: /note="Description of Artificial Sequence: Synthetic oligonucleotide"
caagcagaagacggcatacgagctcttccgatctatctctgatggatacagtgtctctcgaca

SEQ ID NO: 1772 - DNA, 63 bp, Artificial Sequence
  source: /note="Description of Artificial Sequence: Synthetic oligonucleotide"
caagcagaagacggcatacgagctcttccgatcttttcctctgagtcaacagtctccagaata

SEQ ID NO: 1773 - DNA, 63 bp, Artificial Sequence
  source: /note="Description of Artificial Sequence: Synthetic oligonucleotide"
caagcagaagacggcatacgagctcttccgatctctctgagaggtatcatgtttcttgaaata

SEQ ID NO: 1774 - DNA, 63 bp, Artificial Sequence
  source: /note="Description of Artificial Sequence: Synthetic oligonucleotide"
caagcagaagacggcatacgagctcttccgatcttcctgaagggtacaaagtctctcgaaaag

SEQ ID NO: 1775 - DNA, 63 bp, Artificial Sequence
  source: /note="Description of Artificial Sequence: Synthetic oligonucleotide"
caagcagaagacggcatacgagctcttccgatcttcctgaggggtacagtgtctctagagaga

SEQ ID NO: 1776 - DNA, 63 bp, Artificial Sequence
  source: /note="Description of Artificial Sequence: Synthetic oligonucleotide"
caagcagaagacggcatacgagctcttccgatctcatcagccgcccaaacctaacattctcaa

SEQ ID NO: 1777 - DNA, 63 bp, Artificial Sequence
  source: /note="Description of Artificial Sequence: Synthetic oligonucleotide"
caagcagaagacggcatacgagctcttccgatctcctgaatgccctgacagctctcgcttata

SEQ ID NO: 1778 - DNA, 63 bp, Artificial Sequence
  source: /note="Description of Artificial Sequence: Synthetic oligonucleotide"
caagcagaagacggcatacgagctcttccgatctcctaaatctccagacaaagctcacttaaa

SEQ ID NO: 1779 - DNA, 62 bp, Artificial Sequence
  source: /note="Description of Artificial Sequence: Synthetic oligonucleotide"
caagcagaagacggcatacgagctcttccgatctctcacctgactctccagacaaagctcat

SEQ ID NO: 1780 - DNA, 63 bp, Artificial Sequence
  source: /note="Description of Artificial Sequence: Synthetic oligonucleotide"
caagcagaagacggcatacgagctcttccgatctgaccccaggaccggcagttcatcctgagt

SEQ ID NO: 1781 - DNA, 63 bp, Artificial Sequence
  source: /note="Description of Artificial Sequence: Synthetic oligonucleotide"
caagcagaagacggcatacgagctcttccgatctctgaatgccccaacagctctctcttaaac

SEQ ID NO: 1782 - DNA, 63 bp, Artificial Sequence
  source: /note="Description of Artificial Sequence: Synthetic oligonucleotide"
caagcagaagacggcatacgagctcttccgatctctgaatgccccaacagctctcacttattc

SEQ ID NO: 1783 - DNA, 63 bp, Artificial Sequence
  source: /note="Description of Artificial Sequence: Synthetic oligonucleotide"
caagcagaagacggcatacgagctcttccgatcttggtcgattctcagggcgccagttctcta

SEQ ID NO: 1784 - DNA, 63 bp, Artificial Sequence
  source: /note="Description of Artificial Sequence: Synthetic oligonucleotide"
caagcagaagacggcatacgagctcttccgatcttaatcgattctcagggcgccagttccatg

SEQ ID NO: 1785 - DNA, 63 bp, Artificial Sequence
  source: /note="Description of Artificial Sequence: Synthetic oligonucleotide"
caagcagaagacggcatacgagctcttccgatcttcctagattctcaggtctccagttcccta

SEQ ID NO: 1786 - DNA, 64 bp, Artificial Sequence
  source: /note="Description of Artificial Sequence: Synthetic oligonucleotide"
caagcagaagacggcatacgagctcttccgatctaagaggaaacttccctgatcgattctcagc

SEQ ID NO: 1787 - DNA, 63 bp, Artificial Sequence
  source: /note="Description of Artificial Sequence: Synthetic oligonucleotide"
caagcagaagacggcatacgagctcttccgatctggcaacttccctgatcgattctcaggtca

SEQ ID NO: 1788 - DNA, 63 bp, Artificial Sequence
  source: /note="Description of Artificial Sequence: Synthetic oligonucleotide"
caagcagaagacggcatacgagctcttccgatctggaaacttccctcctagattttcaggtcg

SEQ ID NO: 1789 - DNA, 63 bp, Artificial Sequence
  source: /note="Description of Artificial Sequence: Synthetic oligonucleotide"
caagcagaagacggcatacgagctcttccgatctgtccccaatggctacaatgtctccagatt

SEQ ID NO: 1790 - DNA, 63 bp, Artificial Sequence
  source: /note="Description of Artificial Sequence: Synthetic oligonucleotide"
caagcagaagacggcatacgagctcttccgatctgccaaaggagaggtccctgatggctacaa

SEQ ID NO: 1791 - DNA, 63 bp, Artificial Sequence
  source: /note="Description of Artificial Sequence: Synthetic oligonucleotide"
caagcagaagacggcatacgagctcttccgatctgtccctgatggttatagtgtctccagagc

SEQ ID NO: 1792 - DNA, 63 bp, Artificial Sequence
  source: /note="Description of Artificial Sequence: Synthetic oligonucleotide"
caagcagaagacggcatacgagctcttccgatctaaggagaagtccccaatggctacaatgtc

SEQ ID NO: 1793 - DNA, 64 bp, Artificial Sequence
  source: /note="Description of Artificial Sequence: Synthetic oligonucleotide"
caagcagaagacggcatacgagctcttccgatctgacaaaggagaagtcccgaatggctacaac

SEQ ID NO: 1794 - DNA, 63 bp, Artificial Sequence
  source: /note="Description of Artificial Sequence: Synthetic oligonucleotide"
caagcagaagacggcatacgagctcttccgatctgttcccaatggctacaatgtctccagatc

SEQ ID NO: 1795 - DNA, 63 bp, Artificial Sequence
  source: /note="Description of Artificial Sequence: Synthetic oligonucleotide"
caagcagaagacggcatacgagctcttccgatctctctagattaaacacagaggatttcccac

SEQ ID NO: 1796 - DNA, 63 bp, Artificial Sequence
  source: /note="Description of Artificial Sequence: Synthetic oligonucleotide"
caagcagaagacggcatacgagctcttccgatctaaggagaagtccccgatggctacaatgta

SEQ ID NO: 1797 - DNA, 63 bp, Artificial Sequence
  source: /note="Description of Artificial Sequence: Synthetic oligonucleotide"
caagcagaagacggcatacgagctcttccgatcttccccgtgatcggttctctgcacagaggt

SEQ ID NO: 1798 - DNA, 63 bp, Artificial Sequence
  source: /note="Description of Artificial Sequence: Synthetic oligonucleotide"
caagcagaagacggcatacgagctcttccgatctagtgatcgcttctctgcagagaggactgg

SEQ ID NO: 1799 - DNA, 62 bp, Artificial Sequence
  source: /note="Description of Artificial Sequence: Synthetic oligonucleotide"
caagcagaagacggcatacgagctcttccgatctggctgcccaacgatcggttctttgcagt

SEQ ID NO: 1800 - DNA, 63 bp, Artificial Sequence
  source: /note="Description of Artificial Sequence: Synthetic oligonucleotide"
caagcagaagacggcatacgagctcttccgatctggcggcccagtggtcggttctctgcagag

SEQ ID NO: 1801 - DNA, 64 bp, Artificial Sequence
  source: /note="Description of Artificial Sequence: Synthetic oligonucleotide"
caagcagaagacggcatacgagctcttccgatctatgatcggttctctgcagagaggcctgagg

SEQ ID NO: 1802 - DNA, 63 bp, Artificial Sequence
  source: /note="Description of Artificial Sequence: Synthetic oligonucleotide"
caagcagaagacggcatacgagctcttccgatctgctgcccagtgatcgcttctttgcagaaa

SEQ ID NO: 1803 - DNA, 63 bp, Artificial Sequence
  source: /note="Description of Artificial Sequence: Synthetic oligonucleotide"
caagcagaagacggcatacgagctcttccgatctggttctctgcagagaggcctaagggatct

SEQ ID NO: 1804 - DNA, 62 bp, Artificial Sequence
  source: /note="Description of Artificial Sequence: Synthetic oligonucleotide"
caagcagaagacggcatacgagctcttccgatctgttccctgacttgcactctgaactaaac

SEQ ID NO: 1805 - DNA, 495 bp, Artificial Sequence
  source: /note="Description of Artificial Sequence: Synthetic polynucleotide"
gcctccctcgcgccatcagagagtgtccttggttacttgcctggcccagtacacctggctccccgctatccccagacagcagactcacctgaggagacggtgaccagggtgccctggccccagtgctggaagtatgtcgacagagtgtccttggttatcaacagtaatacacggccgtgtcgtcagatctcagcctgctcagctccatgtaggctgtgctgatggacgtgtccctggtcatggtgaccctgccctgaaacttctgtgcatagtttgtgccaccactgttagggttgatccatcccatccactcaagcccttgtccaggggcctgtcgcacccagtgcatatagtagccggtgaaggtgtatccagaagccttgcaggagaccttcactgaggccccaggcttcttcacctcagccccagactgcaccagctgcacctgggagtgggctccagagtgtccttggttactgagcgggctggcaaggc

SEQ ID NO: 1806 - DNA, 495 bp, Artificial Sequence
  source: /note="Description of Artificial Sequence: Synthetic polynucleotide"
gcctccctcgcgccatcagagagtgtcacctcttgcttgcctggcccagtacacctggctccccgctatccccagacagcagactcacctgaggagacggtgaccagggtgccctggccccagtgctggaagtatgtcgacagagtgtcacctcttgtcaacagtaatacacagccatgtcctcagatctcaggctgctcagctccatgtaggctgtgctcgcggatgtgtccctggtaatggtgactctgccctggaactcctgtgaatattttgtgttaccattgccagcgttgctccatcccatccactcaagcctttgtccgggggcctggcgcacccaatgcatagcatagctagtgaaggtgtatccagaagccttgcaggaaaccttcactgaggccccaggcttcttcacctcagccccagactgcaccagctgaacctgggagtggacaccagagtgtcacctcttgctgagcgggctggcaaggc

SEQ ID NO: 1807 - DNA, 495 bp, Artificial Sequence
  source: /note="Description of Artificial Sequence: Synthetic polynucleotide"
gcctccctcgcgccatcagagagtgtcctgattctcttgcctggcccagtacacctggctccccgctatccccagacagcagactcacctgaggagacggtgaccagggtgccctggccccagtgctggaagtatgtcgacagagtgtcctgattcttcaacagtaatacacggccgtgtcctcagatctcaggctgctcagctccatgtaggctgtgcttatggaggtgttcctggtcatggtgactctgccctggaacttctgtgcatagcctgtgttaccactgttagggttcatccatcccatccactcaagcccttgtccagtggcctgtcgcacccagttgatatcataactggtgaaggtgtatccagaagccttgcaggagaccttcactgaggccccaggcttcttcacctcagccccagactgcaccagctgcacctgggagtgggcaccagagtgtcctgattctctgagcgggctggcaaggc

SEQ ID NO: 1808 - DNA, 495 bp, Artificial Sequence
  source: /note="Description of Artificial Sequence: Synthetic polynucleotide"
gcctccctcgcgccatcagagagtgtcagtaccgacttgcctggcccagtacacctggctccccgctatccccagacagcagactcacctgaggagacggtgaccagggtgccctggccccagtgctggaagtatgtcgacagagtgtcagtaccgatcaacagtaatacacggccgtgtcgtcagatctcaggctcctcagctccatgtaggctgtgctcgtggatgtgtctgtggtcatggtgactctgccctggagcttctgtgcatagtttgtgttaccattgtaagcgctgatccatcccatccactcaagcccttgtccaggggcctgtcgcacccagctgataccatagctggtaaaggtgtaaccagaagccttgcaggagaccttcactgaggccccaggcttcttcacctcagctccagactgcaccagctgaacctgggagtgggcaccagagtgtcagtaccgactgagcgggctggcaaggc

SEQ ID NO: 1809 - DNA, 495 bp, Artificial Sequence
  source: /note="Description of Artificial Sequence: Synthetic polynucleotide"
gcctccctcgcgccatcagagagtgtcatccatggcttgcctggcccagtacacctggctccccgctatccccagacagcagactcacctgaggagacggtgaccagggtgccctggccccagtgctggaagtatgtcgacagagtgtcatccatggtcaacagtaatacacggccgtgtcctcagatctcaggctgctcagctccatgtaggctgtgtctgtagatgtgtcctcggtcatggtgactctgccctggaacttctgtgcgtagattgtttcaccatcttcaggatcaaaacctcccatccactcaagcccttttccaggagcctgtcgcacccagtgcatggataattcagtgagggtgtatccggaaaccttgcaggagaccttcactgaggccccaggcttcttcacctcagccccagactgtaccagctggacctgggcgtgggtgccagagtgtcatccatggctgagcgggctggcaaggc

SEQ ID NO: 1810 - DNA, 495 bp, Artificial Sequence
  source: /note="Description of Artificial Sequence: Synthetic polynucleotide"
gcctccctcgcgccatcagagagtgtcgtagcagtcttgcctggcccagtacacctggctccccgctatccccagacagcagactcacctgaggagacggtgaccagggtgccctggccccagtgctggaagtatgtcgacagagtgtcgtagcagttcaacagtaatacatggctgtgtcctcagatctcaggctgctcagctccatgtaggctgtgctcatagacctgtccctggtaatggtgactctgtcctggaatttctgtgcgtagttggtgttaccattgaaaggtgtgatccatcccatccactcaagcgcttgtccgggggcctgtcgcacccagtgcaggtagcggtaggtgaaggtgtatccggaagccttgcaggaaaccttcactgaggacccagtcttcttcacctcagccccagactgcaccagctgcatctgggagtaggcatcagagtgtcgtagcagtctgagcgggctggcaaggc

SEQ ID NO: 1811 - DNA, 495 bp, Artificial Sequence
  source: /note="Description of Artificial Sequence: Synthetic polynucleotide"
gcctccctcgcgccatcagagagtgtcatcttcgtcttgcctggcccagtacacctggctccccgctatccccagacagcagactcacctgaggagacggtgaccagggtgccctggccccagtgctggaagtatgtcgacagagtgtcatcttcgttcaacagtaatacacggccgtgtcctcagatctcaggctgctcagctccatgtagactgtgctcgtggacgtgtccctggtcatggtgactctgccctggaacttctgtgcgtagcttgtgctaccaccactagggttgattattcccatccactcaagcccttgtccaggggcctgtcgcacccagtgcatatagtagctggtgaaggtgtatccagatgccttgcaggaaaccttcactgaggccccaggcttcttcacctcagccccagactgcaccagctgcacctgggagtgagcaccagagtgtcatcttcgtctgagcgggctggcaaggc

SEQ ID NO: 1812 - DNA, 495 bp, Artificial Sequence
  source: /note="Description of Artificial Sequence: Synthetic polynucleotide"
gcctccctcgcgccatcagagagtgtctccacagtcttgcctggcccagtacacctggctccccgctatccccagacagcagactcacctgaggagacggtgaccagggtgccctggccccagtgctggaagtatgtcgacagagtgtctccacagttcaacagtaatacacggccgtgtcctcggatctcaggctgctcagctccatgtaggctgtgcttgtggacatgtccctggtaatggtgactctttcctggaacttctgtgcgtagtttgtgttaccactgccaacgacgatccatcctatccactcaaggcgttgtccacgagcctgtcgcacccactgcatagcagagctagtaaaggtgaatccagaagccttgcaggagaccttcactgaggtcccaggcttcttcacctcaggcccagactgcaccagctgcatttgggagtgggcaccagagtgtctccacagtctgagcgggctggcaaggc

SEQ ID NO: 1813 - DNA, 495 bp, Artificial Sequence
  source: /note="Description of Artificial Sequence: Synthetic polynucleotide"
gcctccctcgcgccatcagagagtgtcagctagtgcttgcctggcccagtacacctggctccccgctatccccagacagcagactcacctgaggagacggtgaccagggtgccctggccccagtgctggaagtatgtcgacagagtgtcagctagtgtcaacagtaatacacggccgtgtcctcagatctcaggctgctcagctccatgtaggctgtgctcgtggatttgtccgcggtaatcgtgactctgccctggaacttctgtgcgtagtttgctgtaccaaagatagggatgatccctcccatccactcaagcccttgtccaggggcctgtcgcacccagctgatagcatagctgctgaaggtgcctccagaagccttgcaggagaccttcaccgaggacccaggcttcttcacctcagccccagactgcaccagctgcacctgggactggacaccagagtgtcagctagtgctgagcgggctggcaaggc

SEQ ID NO: 1814 - DNA, 495 bp, Artificial Sequence
  source: /note="Description of Artificial Sequence: Synthetic polynucleotide"
gcctccctcgcgccatcagagagtgtctaaccaagcttgcctggcccagtacacctggctccccgctatccccagacagcagactcacctgaggagacggtgaccagggtgccctggccccagtgctggaagtatgtcgacagagtgtctaaccaagtcaatagtaatacacagccatgtcctcagatgtcaggctgctcaggtctgtgtaggctgtggttgtggacatgtccctggtcatggtgaatctgccctgaaacttcttggcatagcttgggctaccattgccagggttgatccatcccatccactcaagcccttgtccaggggactgttgcacccaatgtataccgtagctggtgatggtaaacccagaaaaactacaggagactttcactgaggccccagacttcctcacctcagcccaagactgcaccagctggacctgggagtgggcaccagagtgtctaaccaagctgagcgggctggcaaggc

SEQ ID NO: 1815 - DNA, 495 bp, Artificial Sequence
  source: /note="Description of Artificial Sequence: Synthetic polynucleotide"
gcctccctcgcgccatcagagagtgtccaagaggtcttgcctggcccagtacacctggctccccgctatccccagacagcagactcacctgaggagacggtgaccagggtgccctggccccagtgctggaagtatgtcgacagagtgtccaagaggttcaacagtaatacacggccgtgtcctcagatctcaggctgctcagctccatgtaggctgtgtctgtagacgtgtccgcggttatggtgactctgccctggaacttctctgcgtatattgtttcaccatcttcaggatcaacaagtcccatccactcaagcccttttccaggggcctgttgcacccagtgcatgtagtagtcggtgaaggtgtatccagaaaccttgcaggagattttcactgtagccccaggcttcttcacctcagccccagactgtaccagctggacctcggcgtgggtgccagagtgtccaagaggtctgagcgggctggcaaggc

SEQ ID NO: 1816 - DNA, 495 bp, Artificial Sequence
  source: /note="Description of Artificial Sequence: Synthetic polynucleotide"
gcctccctcgcgccatcagagagtgtcagttgacccttgcctggcccagtacacctggctccccgctatccccagacagcagactcacctgaggagacggtgaccagggtgccctggccccagtgctggaagtatgtcgacagagtgtcagttgacctcatgcacagtaatatgtggctgtgtccacagggtccatgttggtcattgtaaggaccacctggtttttggaggtgtccttggtgatggtgagcctgctcttcagagatgggctgtagcgcttatcatcattccaataaatgagtgcaagccactccagggcctttcctgggggctgacggatccagcccacacccactccactagtgctgagtgagaacccagagaaggtgcaggtcagcgtgagggtctgtgtgggtttcaccagcgtaggaccagactccttcaaggtgatctgggacaaagagtgtcagttgaccctgagcgggctggcaaggc

SEQ ID NO: 1817 - DNA, 495 bp, Artificial Sequence
  source: /note="Description of Artificial Sequence: Synthetic polynucleotide"
gcctccctcgcgccatcagagagtgtccagcatatcttgcctggcccagtacacctggctccccgctatccccagacagcagactcacctgaggagacggtgaccagggtgccctggccccagtgctggaagtatgtcgacagagtgtccagcatattcatgcacagtaatatgtggctgtgtccacagggtccatgttggtcatggtaaggaccacctggcttttggaggtgtccttggagatggtgagcctgctcttcagagatgtgctgtaggatttttcgtcattcgaaaaaatgtgtgcaagccactccagggccttccctgggggctgacggatccagctcacacccattctagcattgctgagtgagaacccagagacggtgcaggtcagcgtgagggtctctgtgggtttcaccagcacaggaccagactccttcaaggtgacctgggacaaagagtgtccagcatatctgagcgggctggcaaggc

SEQ ID NO: 1818 - DNA, 495 bp, Artificial Sequence
  source: /note="Description of Artificial Sequence: Synthetic polynucleotide"
gcctccctcgcgccatcagagagtgtcgcaggattcttgcctggcccagtacacctggctccccgctatccccagacagcagactcacctgaggagacggtgaccagggtgccctggccccagtgctggaagtatgtcgacagagtgtcgcaggatttcatgcacaataatacgtggctgtgtccacagggtccatgttggtcattgtaaggaccacctggtttttggaggtgtccttggagatggtgagcctggtcttcagagatgtgctgtagtatttatcatcatcccaatcaatgagtgcaagccactccagggccttccctgggggctgacggatccagctcacacacattccactagtgctgagtgagaacccagagaaggtgcaggtcagtgtgagggtctgtgtgggtttcaccagcgcaggaccagactccctcaaggtgacctgggataaagagtgtcgcaggattctgagcgggctggcaaggc

SEQ ID NO: 1819 - DNA, 495 bp, Artificial Sequence
  source: /note="Description of Artificial Sequence: Synthetic polynucleotide"
gcctccctcgcgccatcagagagtgtcgtccattccttgcctggcccagtacacctggctccccgctatccccagacagcagactcacctgaggagacggtgaccagggtgccctggccccagtgctggaagtatgtcgacagagtgtcgtccattctcaacagtaatacacagccgtgtcctcggctctcaggctgttcatttgcagatacagtgagttcttggcgttgtctctggagatggtgaatcggcccttcacagagtccacatagtatttctcacttccatcttgctttatgttggccacccactccagccccttccctggagcctggcggacccagctcatccaatagctactaaaggtgaatccagaggctgcacaggagagtctcagggaccccccaggctggaccaagcctcccccagactccaccagctgcacctcacactggacaccagagtgtcgtccattcctgagcgggctggcaaggc

SEQ ID NO: 1820 - DNA, 495 bp, Artificial Sequence
  source: /note="Description of Artificial Sequence: Synthetic polynucleotide"
gcctccctcgcgccatcagagagtgtcgcataactcttgcctggcccagtacacctggctccccgctatccccagacagcagactcacctgaggagacggtgaccagggtgccctggccccagtgctggaagtatgtcgacagagtgtcgcataacttcatgcacagtaatacaaggccgtgtcctcagctctcagactgttcatttgcagatacagggagttcttggcgttgtctctggagatggtgaatcggcccttcacagagtccgcatagcctatgctaccactattccaactaatacctgagacccactccaggcccttccctggagcttgccggacccagtgcatggcataatcatcaaaggtgaatccagaggctgcacaggagagtctcagggacctgccaggctgtaccaagcctcccccagactccaccagctgcacttcacactggacagagtgtcgcataactctgagcgggctggcaaggc

SEQ ID NO: 1821 - DNA, 495 bp, Artificial Sequence
  source: /note="Description of Artificial Sequence: Synthetic polynucleotide"
gcctccctcgcgccatcagagagtgtcatatgctgcttgcctggcccagtacacctggctccccgctatccccagacagcagactcacctgaggagacggtgaccagggtgccctggccccagtgctggaagtatgtcgacagagtgtcatatgctgtcaacagtaatacacggccgtgtcctcggctctcaggctgttcatttgcagatacagtgagttcttggcgttgtccctggagatggtgaatcggcccttcacagagtctgcgtagtatatggtactaccactactactaatgtatgaaacccactccagccccttccctggagcctggcggatccagctcatgtagtagtcactgaaggtgaatccagaggctgcacaggagagtctcagggaccctccaggcttgaccaagcctcccccagactccaccagctgcacctgacactggacaccagagtgtcatatgctgctgagcgggctggcaaggc

SEQ ID NO: 1822 - DNA, 495 bp, Artificial Sequence
  source: /note="Description of Artificial Sequence: Synthetic polynucleotide"
gcctccctcgcgccatcagagagtgtcaatcctgccttgcctggcccagtacacctggctccccgctatccccagacagcagactcacctgaggagacggtgaccagggtgccctggccccagtgctggaagtatgtcgacagagtgtcaatcctgctcaacagtaatacacagccgtgtccccggctctcaggctgttcatttgaagatacaaggagttcttggcattttctctggagatggtgaatcggcccttcacggagcctggatagtatgtgtcaccagcagtaccaatagctgagacccactccagaccttttcctgtagcttggcggacccagtgcatgtcgtagctactgaaggtgaatccagaggctgcacaggagagtctcagggaccccccaggctgtaccaagcctcccccagactccaccagctgcacctcacactggacacctgcagagtgtcaatcctgcctgagcgggctggcaaggc

SEQ ID NO: 1823 - DNA, 495 bp, Artificial Sequence
  source: /note="Description of Artificial Sequence: Synthetic polynucleotide"
gcctccctcgcgccatcagagagtgtctgagacctcttgcctggcccagtacacctggctccccgctatccccagacagcagactcacctgaggagacggtgaccagggtgccctggccccagtgctggaagtatgtcgacagagtgtctgagaccttcaacagtaatacacggctgtgtcctcggttttcaggctgttcatttgcagatacagcgtgttttttgaatcatctcttgagatggtgaatctgcctttcacgggtgcagcgtagtctgttgtcccaccatcagttttgcttttaatacggccaacccactccagccccttccctggagcctggcggacccagctcatccaggcgttactgaaagtgaatccagaggctgcacaggagagtctaagggaccccccaggctttaccaagcctcccccagactccaccagctgcacctcacactgagagtgtctgagacctctgagcgggctggcaaggc

SEQ ID NO: 1824 - DNA, 495 bp, Artificial Sequence
  source: /note="Description of Artificial Sequence: Synthetic polynucleotide"
gcctccctcgcgccatcagagagtgtcgaatggaccttgcctggcccagtacacctggctccccgctatccccagacagcagactcacctgaggagacggtgaccagggtgccctggccccagtgctggaagtatgtcgacagagtgtcgaatggactcaacagtaatacacagccatgtcctcggctctccgtctgttcttttgcagatacagggagttcctggaattgtctctggagatgatgaatcggcgcttcacggagtccacatagtgcgtcctactgccattccaactaacacccgatacccactccagcccctttcctggagccttgcgggcccagttcatgtcactgttactgaaggtgaatccagaggctgcacaggagagtctcagggaccccccaggctgtaccaagcctcccccagactccaccagctgcacctcacactggacaccagagtgtcgaatggacctgagcgggctggcaaggc

SEQ ID NO: 1825 - DNA, 495 bp, Artificial Sequence
  source: /note="Description of Artificial Sequence: Synthetic polynucleotide"
gcctccctcgcgccatcagagagtgtccacatggacttgcctggcccagtacacctggctccccgctatccccagacagcagactcacctgaggagacggtgaccagggtgccctggccccagtgctggaagtatgtcgacagagtgtccacatggatcaacagtgatacaaggccgtgtcctcggctctcagactgttcatttgcagatacagggagttcttggcgttgtctctggagatggtgaatcggcccttcacagagtctgcataacctgtgctaccaccattccaattaataccagagacccactccagccccttccctggagcttggcggacccagctcatgccataatcatcaaaggtgaatccagaggctgcacaggagagtctcagggaccccccaggccgtaccacacctcccccagactccaccagctgcacctcacactggacaccagagtgtccacatggactgagcgggctggcaaggc

SEQ ID NO: 1826 - DNA, 495 bp, Artificial Sequence
  source: /note="Description of Artificial Sequence: Synthetic polynucleotide"
gcctccctcgcgccatcagagagtgtcttgaccatcttgcctggcccagtacacctggctccccgctatccccagacagcagactcacctgaggagacggtgaccagggtgccctggccccagtgctggaagtatgtcgacagagtgtcttgaccattcaacagtaatacacagccgtgtcctcggctctcaggctgttcatttgcagatacagtgagttcttggcgttgtctctggagatggtgaatcggcccttcactgagtctgcgtagtatatgtaactactactactactaatggatgagacccactccagccccttccctggagcctggcggacccagttcatgctatagctactgaaggtgaatccagaggctgcacaggagagtctcagggaccccccaggcttgaccaggcctcccccagactccaccagctgcacctcacactggacaccagagtgtcttgaccatctgagcgggctggcaaggc

SEQ ID NO: 1827 - DNA, 495 bp, Artificial Sequence
  source: /note="Description of Artificial Sequence: Synthetic polynucleotide"
gcctccctcgcgccatcagagagtgtcaagccatccttgcctggcccagtacacctggctccccgctatccccagacagcagactcacctgaggagacggtgaccagggtgccctggccccagtgctggaagtatgtcgacagagtgtcaagccatctcaacagtaatatacggccgtgtcctcggctctcaggctgttcatttgcagatacagcgtgttcttggaattgtctctggagatggtgaaccggcccttcacggagtctgcgtagtatgtgctaccaccactaccactaatagctgagacccactccagccccttccctggagcctggcggacccagctcatggcatagctgctaaaggtgaatccagaggctgcacaggagagtctcagggaccccccaggctgtaccaagcctcccccagactccaacagctgcacctcacactggacaccagagtgtcaagccatcctgagcgggctggcaaggc

SEQ ID NO: 1828 - DNA, 495 bp, Artificial Sequence
  source: /note="Description of Artificial Sequence: Synthetic polynucleotide"
gcctccctcgcgccatcagagagtgtctccatgtgcttgcctggcccagtacacctggctccccgctatccccagacagcagactcacctgaggagacggtgaccagggtgccctggccccagtgctggaagtatgtcgacagagtgtctccatgtgtcaacagtaatacacagccgtgtcctcagctctcaggctgttcatttgcagatacagcgtgttcttggaattgtctctggagatggtgaatcggcccttcacggagtctgcatagtatttattacttccatcatatgatataactgccacccactccagccccttgcctggagcctggcggacccagtgcatgccatagctactgaaggtgaatccagaggctgcacaggagagtctcagggacctcccaggctggaccacgcctcccccagactccaccagctgcacctgacactggacaccagagtgtctccatgtgctgagcgggctggcaaggc

SEQ ID NO: 1829 - DNA, 495 bp, Artificial Sequence
  source: /note="Description of Artificial Sequence: Synthetic polynucleotide"
gcctccctcgcgccatcagagagtgtccaagtcaccttgcctggcccagtacacctggctccccgctatccccagacagcagactcacctgaggagacggtgaccagggtgccctggccccagtgctggaagtatgtcgacagagtgtccaagtcactcaacagtaatacacagccgtgtcctcagctctcaggctgttcatttgcagatacagcgtgttcttggaattgtctctggagatggtgaatcggcccttcacggagtctgcatagtatttattacttccatcatatgatataactgccacccactccagccccttgcctggagcctggcggacccagtgcatgccatagctactgaaggtgaatccagaggctgcacaggagagtctcagggacctcccaggctggaccacgcctcccccagactccaccagctgcacctgacactggacaccagagtgtccaagtcacctgagcgggctggcaaggc

SEQ ID NO: 1830 - DNA, 495 bp, Artificial Sequence
  source: /note="Description of Artificial Sequence: Synthetic polynucleotide"
gcctccctcgcgccatcagagagtgtcctgcaatccttgcctggcccagtacacctggctccccgctatccccagacagcagactcacctgaggagacggtgaccagggtgccctggccccagtgctggaagtatgtcgacagagtgtcctgcaatctcaacagtaatacacagccgtgtcctcggctctcaggctgttcatttgcagatacagcgtgttcttggaattgtctctggagatggtgaatcggcccttcacggagtctgcatagtatttattacttccatcataccatataactgccacccactccagccccttgcctggagcctggcggacccagtgcatgccatagctactgaaggtgaatccagacgctgcacaggagagtctcagggacctcccaggctggaccacgcctcccccagactccaccagctgcacctgacactggacaccagagtgtcctgcaatcctgagcgggctggcaaggc

SEQ ID NO: 1831 - DNA, 495 bp, Artificial Sequence
  source: /note="Description of Artificial Sequence: Synthetic polynucleotide"
gcctccctcgcgccatcagagagtgtcatcgacgacttgcctggcccagtacacctggctccccgctatccccagacagcagactcacctgaggagacggtgaccagggtgccctggccccagtgctggaagtatgtcgacagagtgtcatcgacgatcaacagtaatacacagccgtgtcctcggccctcaggctattcgtttgcagatacagggtgttcctggaattgtctctggagatgatgaatcggcccttcacagagtctgcatagtgcgtcctactgccattccaactaacacccgatacccactccagcccctttcctggagcctgatggacccagttcatgtcactgttactgaaggtgaatccagaggctgcacaggagagtctcagggatcccccaggctgtaccaagcctcccccagactccaccagctgcacctcacactggacaccagagtgtcatcgacgactgagcgggctggcaaggc

SEQ ID NO: 1832 - DNA, 495 bp, Artificial Sequence
  source: /note="Description of Artificial Sequence: Synthetic polynucleotide"
gcctccctcgcgccatcagagagtgtcacagactgcttgcctggcccagtacacctggctccccgctatccccagacagcagactcacctgaggagacggtgaccagggtgccctggccccagtgctggaagtatgtcgacagagtgtcacagactgtcaacagtaatacacggccgtgccctcagctctcaggttgttcatttgaagatacagcgtgttcttggaattgtctctggagatggtgaatctgcccttcctggagtctgcgtagtatgtgctaccaccactaatggatgagacccactccagccccttccctggagcctggcggatccagctcatctcattgctactgacggtgaatccagaggctgcacaggagagtctcagggaccccctaggctgtaccaagcctcccccagactccaccagctgcacctcacactggacacctgcaaaagagtgtcacagactgctgagcgggctggcaaggc

SEQ ID NO: 1833 - DNA, 495 bp, Artificial Sequence
  source: /note="Description of Artificial Sequence: Synthetic polynucleotide"
gcctccctcgcgccatcagagagtgtcccttatagcttgcctggcccagtacacctggctccccgctatccccagacagcagactcacctgaggagacggtgaccagggtgccctggccccagtgctggaagtatgtcgacagagtgtcccttatagtcatgcacagtaatacaaggcggtgtcctcagttctcagactgttcatttgcagatacagggagtttttgctgttgtctctggagatggtgaatcggcccttcacagagtctgcatagtatgtgctaccaccatcccaactaataagagagacccactccagacccttccccggagcttgacggacccagtgcatggtataatcatcaaaggtgaatccagaggctgcacaggagagtctcagggaccccccaggctgtaccacgactcccccagactccaccagctgcacttcacactggacagagtgtcccttatagctgagcgggctggcaaggc

SEQ ID NO: 1834 - DNA, 495 bp, Artificial Sequence
  source: /note="Description of Artificial Sequence: Synthetic polynucleotide"
gcctccctcgcgccatcagagagtgtctacgcgttcttgcctggcccagtacacctggctccccgctatccccagacagcagactcacctgaggagacggtgaccagggtgccctggccccagtgctggaagtatgtcgacagagtgtctacgcgtttcaacagtaatacacagccgtgtcctcgtctctcaggctgttcatttgcagatacagtgagttcttggcattgtctctggagatggtgaatcggcccttcacagagtctgcgtagtatatggtactactactactactaatgtatgaaacccactccagccccttccctggagcctggcggacccagttcatgctatagctactgaaggtgaatccagaggctgcacaggagagtctcagggaccccccaggctgtaccaagcctcccccagactccaccagctgcacctcacactggacaccagagtgtctacgcgttctgagcgggctggcaaggc

SEQ ID NO: 1835 - DNA, 495 bp, Artificial Sequence
  source: /note="Description of Artificial Sequence: Synthetic polynucleotide"
gcctccctcgcgccatcagagagtgtcctataaggcttgcctggcccagtacacctggctccccgctatccccagacagcagactcacctgaggagacggtgaccagggtgccctggccccagtgctggaagtatgtcgacagagtgtcctataaggtcaacagtaatacacggctgtgtcctcggttttcaggctgttcatttgcagataggcgatgcttttggaatcatctcttgagatggtgaatctgcctttcacagacgcggcgtattctgttgtcccaccataagctttgcttctaatgaaacctacccactccagccccttccctggagcctggcggaaccagctcatagcataatcaccaaaggtgaatccagaagctgtacaggagagtctcagggaccgccctggctgtaccaagcctcccccagactccaccagctgcacctcacattgagagtgtcctataaggctgagcgggctggcaaggc

SEQ ID NO: 1836 - DNA, 495 bp, Artificial Sequence
  source: /note="Description of Artificial Sequence: Synthetic polynucleotide"
gcctccctcgcgccatcagagagtgtctcttagtccttgcctggcccagtacacctggctccccgctatccccagacagcagactcacctgaggagacggtgaccagggtgccctggccccagtgctggaagtatgtcgacagagtgtctcttagtctcaacagtaatacacggccgtgtcctcggctctcaggctgttcatttgaagatacagcgtgttcttggaattgtctctggagatggtgaatcggcccttcacggagtctgcgtagtatgtgctaccaccgctataaataactgagacccactccagccccttccctggagcctggcggacccagctcatgtagttgctactgacggtgaacccagaggctgcacaggagagtctcagggaccccccaggctggatcaagcctcctccagactccaccagctgcacctcacactggacacctgcagagtgtctcttagtcctgagcgggctggcaaggc

SEQ ID NO: 1837 - DNA, 495 bp, Artificial Sequence
  source: /note="Description of Artificial Sequence: Synthetic polynucleotide"
gcctccctcgcgccatcagagagtgtctgtctgcacttgcctggcccagtacacctggctccccgctatccccagacagcagactcacctgaggagacggtgaccagggtgccctggccccagtgctggaagtatgtcgacagagtgtctgtctgcatcaacagtaatacacagccatgtcctcagctctcaggctgcccatttgaagatacagcgtgttcttggaattgtctctggagatggtgaatctgcccttcacagagtctgcataatatgtgctacccccattactactaatagctgaaacatattccagtcccttccctggagcctggcggacccagtgcatagcatagctactgaaggtgaatccagaggctgcacaggagagtctcagggaccccccaggctggaccaagccttccccagactccaccagctgcacctcacactggacaccagagtgtctgtctgcactgagcgggctggcaaggc

SEQ ID NO: 1838 - DNA, 495 bp, Artificial Sequence
  source: /note="Description of Artificial Sequence: Synthetic polynucleotide"
gcctccctcgcgccatcagagagtgtcgccattaacttgcctggcccagtacacctggctccccgctatccccagacagcagactcacctgaggagacggtgaccagggtgccctggccccagtgctggaagtatgtcgacagagtgtcgccattaatcaacagtaatacacagccgtgtcctcagctctcaggctgttcatttgaagatacagcgtgttcttggaattgtctctggagatggtgaatcggcccttcacggagtctgcgtagtatgtgctaccacagctataaataactgagacccactccagccccttccctggagcctggcggacccagctcatgtagttgctactgacggtgaacccagaggctgcacaggagagtctcagggaccccccaggctggatcaagcctcctccagactccaccagctgcacctcacactggacacctgcagagtgtcgccattaactgagcgggctggcaaggc

SEQ ID NO: 1839 - DNA, 495 bp, Artificial Sequence
  source: /note="Description of Artificial Sequence: Synthetic polynucleotide"
gcctccctcgcgccatcagagagtgtcgactaagacttgcctggcccagtacacctggctccccgctatccccagacagcagactcacctgaggagacggtgaccagggtgccctggccccagtgctggaagtatgtcgacagagtgtcgactaagatcaacagtaatacacggccgtgtcctcggttttcaggctgttcatttgcagatacagtgagttctttgaatcatctcttgagatggtgaatctgcctttcacagacgcggcgtattctgtggtgtaactgttagctttgtttctagtacggccaacccactccagccccttccctggagcctggcggacccagtccatgtagtggtcactgaaggtgaatccagaggctgcacaggagagtctcagggaccctccaggctggaccaagcctcccccagactccaccagctgcacctcacactgagagtgtcgactaagactgagcgggctggcaaggc

SEQ ID NO: 1840 - DNA, 495 bp, Artificial Sequence
  source: /note="Description of Artificial Sequence: Synthetic polynucleotide"
gcctccctcgcgccatcagagagtgtcaggttgctcttgcctggcccagtacacctggctccccgctatccccagacagcagactcacctgaggagacggtgaccagggtgccctggccccagtgctggaagtatgtcgacagagtgtcaggttgcttcaacagtaatacacggccgtgtcctcggttttcaggctgttcatttgcagatacgccgtgttctttgaatcatctctggagatggtgaacctgcctttcaccgacgcagcatatgctgtcgcgtaactgttagctttgcttctaatacggccaacccactccagccctttcccggaagcctggcggacccagtgcatagcagagccactgaaggtgaacccagaggctgcacaggagagtttcagggaccccccaggctggaccaagcctcccccggactccaccagctgcacctcacactgagagtgtcaggttgctctgagcgggctggcaaggc

SEQ ID NO: 1841 - DNA, 495 bp, Artificial Sequence
  source: /note="Description of Artificial Sequence: Synthetic polynucleotide"
gcctccctcgcgccatcagagagtgtcctcgagaacttgcctggcccagtacacctggctccccgctatccccagacagcagactcacctgaggagacggtgaccagggtgccctggccccagtgctggaagtatgtcgacagagtgtcctcgagaatcaacagtaatacacagccgtgtcctcggctctcagactgttcatttgcagatacagcgtgttcttggcgttgtctctggagatggtgaatcggcccttcacggagtccgcgtagcttgtgctactcccatcactattaatacgtgagacccacaccagccccttccctggagcttggcggacccagtgcatccagtagctactgaaggtgaatccagaggctgcacaggagagtctcagggaccccccaggctgaactaagcctcccccggactccaccagctgcacctcacactggacaccagagtgtcctcgagaactgagcgggctggcaaggc

SEQ ID NO: 1842 - DNA, 495 bp, Artificial Sequence
  source: /note="Description of Artificial Sequence: Synthetic polynucleotide"
gcctccctcgcgccatcagagagtgtcttaatggccttgcctggcccagtacacctggctccccgctatccccagacagcagactcacctgaggagacggtgaccagggtgccctggccccagtgctggaagtatgtcgacagagtgtcttaatggctcaacagtaatacacagccgtgtcctcagctctcaggctgttcatttgcagatacagcgtgttcttggaattgtctctggagatggtgaatcggcccttcacggagtctgcatagtatttattacttccatcataccgtataaatgccacccactccagccccttgcctggagcctggcggacccagtgcatgccatagctactgaaggtgaatccagacgctgcacaggagagtctcagggaccccccaggctggaccacgcctcccccagactccaccagctgcacctgacactggacaccagagtgtcttaatggcctgagcgggctggcaaggc

SEQ ID NO: 1843 - DNA, 495 bp, Artificial Sequence
  source: /note="Description of Artificial Sequence: Synthetic polynucleotide"
gcctccctcgcgccatcagagagtgtctgcagacacttgcctggcccagtacacctggctccccgctatccccagacagcagactcacctgaggagacggtgaccagggtgccctggccccagtgctggaagtatgtcgacagagtgtctgcagacatcaacagtaatacacagccgtgtcctcagctctcaggctgttcatttgaagatgcagcgtgttcttggaattgtctctggagatggtgaatctgcccttcctggagtctgcgtagtatgtgctaccaccactaatggatgagacccactccagacccttccctggagcctggcggacccagctcatctcattgctactgacggtgaatccagaggctgcacaggagagtctcagggaccccccaggctgtaccaagactccccgagactccaccagctgcacctcacactggacacctgcaaaagagtgtctgcagacactgagcgggctggcaaggc

SEQ ID NO: 1844 - DNA, 495 bp, Artificial Sequence
  source: /note="Description of Artificial Sequence: Synthetic polynucleotide"
gcctccctcgcgccatcagagagtgtctcactgagcttgcctggcccagtacacctggctccccgctatccccagacagcagactcacctgaggagacggtgaccagggtgccctggccccagtgctggaagtatgtcgacagagtgtctcactgagtcaacagtaatacacggccgtgtccgcggcggtcacagagctcagcttcagggagaactggttcttggacgtgtctactgacatggtgactcgactcttgagggaggggttgtagttggtgctcccactggtatagatacgcccaatccactccagtcccttcccggcgggctgccggatccagctccagtagtaactactgatggagccaccagagacagtgcaggtgagggacagggtctccgaaggcttcaccagtcctgggcccgactcctgcagctgcacctgggacaggacccctgtagagtgtctcactgagctgagcgggctggcaaggc

SEQ ID NO: 1845 - DNA, 495 bp, Artificial Sequence
  source: /note="Description of Artificial Sequence: Synthetic polynucleotide"
gcctccctcgcgccatcagagagtgtcgagtacgtcttgcctggcccagtacacctggctccccgctatccccagacagcagactcacctgaggagacggtgaccagggtgccctggccccagtgctggaagtatgtcgacagagtgtcgagtacgttcaacagtaatacacggccgtgtccacggcggtcacagagctcagcttcagggagaactggttcttggacgtgtctactgacatggtgactcgactcttgagggacgggttgtagtaggtgctcccactataatagatgtacccaatccactccagtcccttccctgggggctgccggatccagccccaccagttactactgctgatggagtaaccagagacagcgcaggtgagggacagggtgtccgaaggcttcaccagtcctgggcccgactcctgcagctgcacctgggacaggaccacagagtgtcgagtacgtctgagcgggctggcaaggc

SEQ ID NO: 1846 - DNA, 495 bp, Artificial Sequence
  source: /note="Description of Artificial Sequence: Synthetic polynucleotide"
gcctccctcgcgccatcagagagtgtcatacgccacttgcctggcccagtacacctggctccccgctatccccagacagcagactcacctgaggagacggtgaccagggtgccctggccccagtgctggaagtatgtcgacagagtgtcatacgccatcaacagtaatacacggccgtgtccgcggcggtcacagagctcagcttcagggagaactggttcttggacctgtctactgatatggtgactcgactcttgagggacgggttgtagtaggtgctcccactatgatagatgtacccaatccactccaggcccttccctggtggctgccggatccagctccaggagtaaccaccactgctgatggagccaccagagacagcgcaggtgagggacagggtctgtgaaggcttcaccagtcctgagccggactcctgcagctgcagctgggacaggacagagtgtcatacgccactgagcgggctggcaaggc

SEQ ID NO: 1847 - DNA, 495 bp, Artificial Sequence
  source: /note="Description of Artificial Sequence: Synthetic polynucleotide"
gcctccctcgcgccatcagagagtgtctcgcatcacttgcctggcccagtacacctggctccccgctatccccagacagcagactcacctgaggagacggtgaccagggtgccctggccccagtgctggaagtatgtcgacagagtgtctcgcatcatcaacagtaatacacggccgtgtctgcggcagtcacagagctcagcttcagggagaactggttcttggacgtgtctactgatatggtaactcgactcttgagggacgggttgtagtaggtgctcccactgtaatagatgtacccaatccactccaggcccttccctgggggctggcggatccaactccagtagtaatcaccactgctgatggagccaccagagacagtgcaggtgagggacagggtctgtgaaggcttcaccagtcctgggcccgactcctgcagctgcacctgggacaggacagagtgtctcgcatcactgagcgggctggcaaggc

SEQ ID NO: 1848 - DNA, 495 bp, Artificial Sequence
  source: /note="Description of Artificial Sequence: Synthetic polynucleotide"
gcctccctcgcgccatcagagagtgtccgcttaatcttgcctggcccagtacacctggctccccgctatccccagacagcagactcacctgaggagacggtgaccagggtgccctggccccagtgctggaagtatgtcgacagagtgtccgcttaattcaacagtaatacacggccgtgtccgcggcagtcacagagctcagcttcagggagaactggttcttagacgtgtctactgatatggtaactcgactcttgagggacgggttgtagtaggtgctcccactgtaatagatgtacccaatccactccaggcccttccctgggtgctggcggatccagctccagtagtaaccaccactgctgatggagccaccagagacagtacaggtgagggacagggtctgtgaaggcttcaccagtcctgggcccgactcctgcagctgcacctggggcaggacagagtgtccgcttaatctgagcgggctggcaaggc

SEQ ID NO: 1849 - DNA, 495 bp, Artificial Sequence
  source: /note="Description of Artificial Sequence: Synthetic polynucleotide"
gcctccctcgcgccatcagagagtgtctggttatccttgcctggcccagtacacctggctccccgctatccccagacagcagactcacctgaggagacggtgaccagggtgccctggccccagtgctggaagtatgtcgacagagtgtctggttatctcaacagtaatacacagccgtgtccgcggcggtcacagagctcagcttcagggagaactggttcttggacgtgtctactgatatggtgactcgactcttgagggacgggttgtagttggtgcttccactatgattgatttccccaatccactccagccccttccctgggggctggcggatccagctccagtagtaaccactgaaggacccaccatagacagcgcaggtgagggacagggtctccgaaggcttcaacagtcctgcgccccactgctgtagctgcacctgggacaggacccctgtagagtgtctggttatcctgagcgggctggcaaggc

SEQ ID NO: 1850 - DNA, 495 bp, Artificial Sequence
  source: /note="Description of Artificial Sequence: Synthetic polynucleotide"
gcctccctcgcgccatcagagagtgtcggattgctcttgcctggcccagtacacctggctccccgctatccccagacagcagactcacctgaggagacggtgaccagggtgccctggccccagtgctggaagtatgtcgacagagtgtcggattgcttcaacagtaatacacagccgtgtctgcggcggtcacagagctcagcttcagggagaactggttcttggacgtgtctacggatatggtgactcgactcttgagggacgggttgtagtaggtgctcccactataatagatactcccaatccactccagccccttccctgggggctggcggatccagccccagtagtaactactactgctgatggagccaccagagacagtgcaggtgagggacagggtctccgaaggcttcaccagtcctgggcccgactcctgcagctgcagctgggacaggacagagtgtcggattgctctgagcgggctggcaaggc

SEQ ID NO: 1851 - DNA, 495 bp, Artificial Sequence
  source: /note="Description of Artificial Sequence: Synthetic polynucleotide"
gcctccctcgcgccatcagagagtgtcctcagtgacttgcctggcccagtacacctggctccccgctatccccagacagcagactcacctgaggagacggtgaccagggtgccctggccccagtgctggaagtatgtcgacagagtgtcctcagtgatcaacagtaatacacggccgtgtccgcagcggtcacagagctcagcttcagggagaactggttcttggacgtgtctactgatatggtgactcgactcttgagggaggggttgtagttggtgctcccactgtaatagatatacccaatccactccagtcccttccctgggggctgccggatccagctccagtagtaactactgatggagccaccagagacagtgcaggtgagggacagggtctccgaaggcttcaccagtcctgggcccgactcctgcagctgcacctgggacaggacccctgtagagtgtcctcagtgactgagcgggctggcaaggc

SEQ ID NO: 1852 - DNA, 495 bp, Artificial Sequence
  source: /note="Description of Artificial Sequence: Synthetic polynucleotide"
gcctccctcgcgccatcagagagtgtcacgtactccttgcctggcccagtacacctggctccccgctatccccagacagcagactcacctgaggagacggtgaccagggtgccctggccccagtgctggaagtatgtcgacagagtgtcacgtactctcaacagtaatacacggccgtgtccgcagcggtcacagagctcagcttcagggagaactggttcttggacgtgtctactgatatggtgactcgactcttgagggaggggttgtagttggtgctcccactgtaatagatatacccaatccactccagtcccttccctgggggctgccggatccagctccagtagtaaccaccactgctgacggagccaccagagacagtgcaggtgagggacagggtctccgaaggcttcaccagtcctgggcccgactcctgcagctgcacctgggacaggacagagtgtcacgtactcctgagcgggctggcaaggc

SEQ ID NO: 1853 - DNA, 495 bp, Artificial Sequence
  source: /note="Description of Artificial Sequence: Synthetic polynucleotide"
gcctccctcgcgccatcagagagtgtctgatgcgacttgcctggcccagtacacctggctccccgctatccccagacagcagactcacctgaggagacggtgaccagggtgccctggccccagtgctggaagtatgtcgacagagtgtctgatgcgatcaacagtaatacacggccgtgtctgcggcggtcacagagctcagcttcagggagaactggttcttggacgtgtctactgatatggtgactcgactcttgagggacgggttgtagtaggtgctcccactatgatagatactcccaatccactccagccccttccctgggggctgccggatccagccccagtagtaaccactgctgatggagtaaccagagacagcgcaggtgagggacagggtctccgaaggcttcaccagtcctgggcccgactcctgcagctgcacctgggacaggaccccagagtgtctgatgcgactgagcgggctggcaaggc

SEQ ID NO: 1854 - DNA, 495 bp, Artificial Sequence
  source: /note="Description of Artificial Sequence: Synthetic polynucleotide"
gcctccctcgcgccatcagagagtgtcattaagcgcttgcctggcccagtacacctggctccccgctatccccagacagcagactcacctgaggagacggtgaccagggtgccctggccccagtgctggaagtatgtcgacagagtgtcattaagcgtcaacagtaatacatggcggtgtccgaggccttcaggctgctccactgcaggtaggcggtgctgatggacttgtcggctgagatggtgacctggccttggaaggacgggctgtatctggtatcagagtcaccaggatagatgatccccatccactccaggcctttcccgggcatctggcgcacccagccgatccagtagctggtaaagctgtatccagaacccttacaggagatcttcagagactccccgggctttttcacctctgctccagactgcaccagctgcacctcggcacagactccagagtgtcattaagcgctgagcgggctggcaaggc

SEQ ID NO: 1855 - DNA, 495 bp, Artificial Sequence
  source: /note="Description of Artificial Sequence: Synthetic polynucleotide"
gcctccctcgcgccatcagagagtgtcagcaatcccttgcctggcccagtacacctggctccccgctatccccagacagcagactcacctgaggagacggtgaccagggtgccctggccccagtgctggaagtatgtcgacagagtgtcagcaatcctcaacagtaatacatggcggtgtccgaggccttcaggctgctccactgcaggtaggcagtgctgatggacttgtcagctgagatggtgacgtggccttggaaggacgggctgtagttggtataagagtcactaggatcaatcctccccatccactccaagcctttcccgggcatctggcgcacccagctgatccagtagctggtaaagctgtatccagaacccttacaggagatcctcagagactccccgggctttttcacctctgctccagactgcaccagctgcacttcggcacagactccagagtgtcagcaatccctgagcgggctggcaaggc

SEQ ID NO: 1856 - DNA, 495 bp, Artificial Sequence
  source: /note="Description of Artificial Sequence: Synthetic polynucleotide"
gcctccctcgcgccatcagagagtgtcgcttagtacttgcctggcccagtacacctggctccccgctatccccagacagcagactcacctgaggagacggtgaccagggtgccctggccccagtgctggaagtatgtcgacagagtgtcgcttagtatcaacagtaatacacagccgtgtcctcgggagtcacagagttcagctgcagggagaactggttcttggatgtgtctgggttgatggttattcgacttttcacagatactgcataatcattataccacttggacctgtagtatgtccttcccagccactcaaggcctctcgatggggactgcctgatccagttccaagcagcactgttgctagagacactgtccccggagatggcacaggtgagtgagagggtctgcgagggcttcaccagtcctggacctgactgctgcagctgtacctgtgaagagtgtcgcttagtactgagcgggctggcaaggc

SEQ ID NO: 1857 - DNA, 495 bp, Artificial Sequence
  source: /note="Description of Artificial Sequence: Synthetic polynucleotide"
gcctccctcgcgccatcagagagtgtctgaccttgcttgcctggcccagtacacctggctccccgctatccccagacagcagactcacctgaggagacggtgaccagggtgccctggccccagtgctggaagtatgtcgacagagtgtctgaccttgtcaacagtaatacacggcagtgtcctcagcctttaggctgcagatctgcagatatgccgtgctgacagaggtgtccaaggagaagacaaaccgtcctgtgaagccctgggcatacgttgggttcccagtgttggtgttgatccatcccatccactcaagcccttgtccaggggcctgtcgcacccaattcatagcatagctagtgaaggtgtatccagaagccttgcaggaaaccttcactgaggccccaggcttcttcaactcagacccagattgcaccagctgcacctgggagtgggcaccagagtgtctgaccttgctgagcgggctggcaaggc

SEQ ID NO: 1858 - DNA, 495 bp, Artificial Sequence
  source: /note="Description of Artificial Sequence: Synthetic polynucleotide"
gcctccctcgcgccatcagagagtgtccaaggtcacttgcctggcccagtacacctggctccccgctatccccagacagcagactcacctgaggagacggtgaccagggtgccctggccccagtgctggaagtatgtcgacagagtgtccaaggtcatcaacagtaatacatggccatgtcctcagcctttaggctgctgatctgcaggtatgctgtgctggcagaggtgtccatggagaagacaaaccgtcctgtgaagccctgggcatatgttgggttcccagtgtaggtgttgaaccatcccatccactcaagcccttgtccaggggcctgtggcacccaattcataccataggtggtgaaactgtaaccagaagccttgcaggagaccttcactgaggccccaggctgcttcacctcatggccagactgcaccagctgcacctgggagtaggtaccagagtgtccaaggtcactgagcgggctggcaaggc

SEQ ID NO: 1859 - DNA, 495 bp, Artificial Sequence
  source: /note="Description of Artificial Sequence: Synthetic polynucleotide"
gcctccctcgcgccatcagagagtgtccactgtaccttgcctggcccagtacacctggctccccgctatccccagacagcagactcacctgaggagacggtgaccagggtgccctggccccagtgctggaagtatgtcgacagagtgtccactgtactcagggaatgtgcggccctgcccttggccatcacggagctcagctgcagggataactgggccttggatgtgtctctacagatggagagttggcccagaaaggctgggctgaagtgtgtgctgcccctggagctgaggtgccccagcgccttcccagagggctgctgggtccaggcccagaggtctgtgaggacctcaccagccctgggcatgactccagtagctgcatctgatgcaggacactcagggacaagaagcaaagagatgagtcacaagcggacaccacagcccacagcccccgttcagagtgtccactgtacctgagcgggctggcaaggc

SEQ ID NO: 1860 - DNA, 495 bp, Artificial Sequence
  source: /note="Description of Artificial Sequence: Synthetic polynucleotide"
gcctccctcgcgccatcagagagtgtcgatgatcccttgcctggcccagtacacctggctccccgctatccccagacagcagactcacctgaggagacggtgaccagggtgccctggccccagtgctggaagtatgtcgacagagtgtcgatgatcctcagtataaaaatccatggtggtttactcattgtgcgggtagctcagctgtaggaaaaactgttttctgaatgtggatctggaggtggtgactggactcttgagaagcgggttgcactgtgtgtttcctcgtgacctacacacctgacccacttcagcttcttccctgggggctggcagatacagctccaggaggaagtactggttatgattggaaatccagagacagcacaggtgaaggagagggtctctgagggctttactagaacatgagtgcactgaaaaacacaatttttttcataggagagtgtcgatgatccctgagcgggctggcaaggc

SEQ ID NO: 1861 - DNA, 495 bp, Artificial Sequence
  source: /note="Description of Artificial Sequence: Synthetic polynucleotide"
gcctccctcgcgccatcagagagtgtccgccaatacttgcctggcccagtacacctggctccccgctatccccagacagcagactcacctgaggagacggtgaccagggtgccctggccccagtgctggaagtatgtcgacagagtgtccgccaatatcaataaaaatcatggttgtgtactccttgttaaggtagctcagctgtaggagaaactgttttttggatgtggatctggagatggtgactggactcttgaggagtgggttggattgtgcactccctcatgacctgtgcacctgattcgctccagtcccttccccggggggtgacggatccagctccagcaggaagcactggttgtaatggagaagcagagatgccacaggccagggggaggatctgtgagggcttcaccaggccaggagtgcaccgagaatcacagttgtcggcatgcacaggagagtgtccgccaatactgagcgggctggcaaggc

SEQ ID NO: 1862 - DNA, 495 bp, Artificial Sequence
  source: /note="Description of Artificial Sequence: Synthetic polynucleotide"
gcctccctcgcgccatcagagagtgtctcaagcctcttgcctggcccagtacacctggctccccgctatccccagacagcagactcacctgaggagacggtgaccagggtgccctggccccagtgctggaagtatgtcgacagagtgtctcaagccttcacagtaatactcagccgtgtcctaggtggtcatggagctgagcttcacagagaactggctcttggttgagtcactgttgatggggacatggacctgggtggagggtgcatgatgtgtattccttgatgatccagtctagtaactgtgccccagccattccagcctgttgcccacgggatggtggattcatctcaaataatatccatggtaaaaaaaagaatccagacacagcacaggcagagggcagtgtctgagggcctcatgggtcctggacctgactcctgcagctgcacctgggacaagagtgtctcaagcctctgagcgggctggcaaggc

SEQ ID NO: 1863 - DNA, 495 bp, Artificial Sequence
  source: /note="Description of Artificial Sequence: Synthetic polynucleotide"
gcctccctcgcgccatcagagagtgtcacgtgtgtcttgcctggcccagtacacctggctccccgctatccccagacagcagactcacctgaggagacggtgaccagggtgccctggccccagtgctggaagtatgtcgacagagtgtcacgtgtgttcacttaaaaatgcgtagttgtgtgttcactgggcacagagctcagctgtaagaactgtttcttggatctggatatggactcttgagcagtgggttgtaatttgtgctcccttcacaacccatgcacctgatccactcctgtccatcttctaggggcaagcagatacaattctagcaggaaacactggttatgatggggaatccagagacagtgcaggtgaggagagggtctgcaaggagtctcaagccagaagtgtgctgagaaacatagttgttgatgttaacaggttctgggcaacacagagagtgtcacgtgtgtctgagcgggctggcaaggc

SEQ ID NO: 1864 - DNA, 495 bp, Artificial Sequence
  source: /note="Description of Artificial Sequence: Synthetic polynucleotide"
gcctccctcgcgccatcagagagtgtctccgtctacttgcctggcccagtacacctggctccccgctatccccagacagcagactcacctgaggagacggtgaccagggtgccctggccccagtgctggaagtatgtcgacagagtgtctccgtctatcagctctaaaatacatggctatgtgtttgttcctcacatagttcagctgtaagaagaactactttttggacatggatctggagatggtgactggactcttgagaagaggggagtaatttgtgctccctccatgacctatgcacccgatccactccagtacctcccatgggggcgctgatggatgcagctccagcaggaaacactggttgtgatggagaatgcagagatggcacaggtgagggagaggttctgtgaaggcttcaccaggccaagagtgcaccgagaaatacagttgttggcagagagtgtctccgtctactgagcgggctggcaaggc

SEQ ID NO: 1865 - DNA, 495 bp, Artificial Sequence
  source: /note="Description of Artificial Sequence: Synthetic polynucleotide"
gcctccctcgcgccatcagagagtgtcaagagctgcttgcctggcccagtacacctggctccccgctatccccagacagcagactcacctgaggagacggtgaccagggtgccctggccccagtgctggaagtatgtcgacagagtgtcaagagctgtcattcaaaatgtgtagttgtgtgttcactgggcacagagctcagctgtaagaactgtttcttggatctggatatggactcttgagaagtgggatgtaatttttgctccctttacaacccatgaacctgatccactcctgtccatcttctaggggcaagcagatacaattctagcaggacacactggttatgatggggaatccagagacagtgcaggtgagggagagggtctgtgaggatgtctcaagccagaagtgcactggaaaacacagttgttgatgttaacagtttctggacaacacgagagtgtcaagagctgctgagcgggctggcaaggc

SEQ ID NO: 1866 - DNA, 495 bp, Artificial Sequence
  source: /note="Description of Artificial Sequence: Synthetic polynucleotide"
gcctccctcgcgccatcagagagtgtctatcgctccttgcctggcccagtacacctggctccccgctatccccagacagcagactcacctgaggagacggtgaccagggtgccctggccccagtgctggaagtatgtcgacagagtgtctatcgctctcagctctaaaatacatggctatgtgtttgttgctcacatagttcacctgtaagaagaagtactttttggacatggatctggagatggtgactggactcttgagaagaggggagtaatctgtgctccctccatgacctatgcacccgatccactccagtacctcccatgggggcgctgatggatgcagctccagaaggaaacactggttgtgatggagaatgcagagatggcacaggtgagggagaggttctgtgaaggcttcaccaggccaagagtgcaccgagaaatacagttgttggcagagagtgtctatcgctcctgagcgggctggcaaggc

SEQ ID NO: 1867 - DNA, 495 bp, Artificial Sequence
  source: /note="Description of Artificial Sequence: Synthetic polynucleotide"
gcctccctcgcgccatcagagagtgtctcagatgccttgcctggcccagtacacctggctccccgctatccccagacagcagactcacctgaggagacggtgaccagggtgccctggccccagtgctggaagtatgtcgacagagtgtctcagatgctcatgaaagaagaattcatgtgcagacacatctgcttgtctgaagatatagtgcatgtgggaacatgtgggcttgtctgaattcatgataagtgggctggaattcatcctccactcatcacgtatgcacctgacccactcctgtgctttccatccagtgcctacaggaagcactgattgtgacagagaatccagaggcagcacaggtgagtgagggggtttgcaagggcttcaccaggctgataattgactgagaaaaacagttgttagcatgcacaagttctggatgatacattggaaacccagagtgtctcagatgcctgagcgggctggcaaggc

SEQ ID NO: 1868 - DNA, 495 bp, Artificial Sequence
  source: /note="Description of Artificial Sequence: Synthetic polynucleotide"
gcctccctcgcgccatcagagagtgtcgtgtagcacttgcctggcccagtacacctggctccccgctatccccagacagcagactcacctgaggagacggtgaccagggtgccctggccccagtgctggaagtatgtcgacagagtgtcgtgtagcatcaacagtaatacaaaccatgtcctcagatgtcacagagctcaggtatagtcaaaattgtttcttggatgaatctctggagaaggagagttggctctgcagagatggatcatcgtgtgtgtcacccttgcaatgtgttcctgacagcccatggaagcgggctagtggattcagctccagcagtaactgttggttgggatggacaacccagaaatggggcatgtgaggaagagaaaatgaaagtggatagcctgttaccgaaaactgctggactaagacacttgtaagcctgtcaatctcagtgagagtgtcgtgtagcactgagcgggctggcaaggc

SEQ ID NO: 1869 - DNA, 495 bp, Artificial Sequence
  source: /note="Description of Artificial Sequence: Synthetic polynucleotide"
gcctccctcgcgccatcagagagtgtctggcagttcttgcctggcccagtacacctggctccccgctatccccagacagcagactcacctgaggagacggtgaccagggtgccctggccccagtgctggaagtatgtcgacagagtgtctggcagtttcacagccaagatatggaaactaagtgtctgtcaatgggcaaatggataaagacaatgtggtatgtgtacacaacatagcattattatgccttataaaataaggaaatgctgccattttccacaagacaaatggactcccaccaccactagcaatggattttatccattgcagcccctccctgagagccggcagatccaggtccactagtaaggactggttgtgacggagtggccagtaacagtgtaggtgaggcagagggtaagtgtgtgctattcaggtccagggctgactcctgcagctgagagtgtctggcagttctgagcgggctggcaaggc

SEQ ID NO: 1870 - DNA, 495 bp, Artificial Sequence
  source: /note="Description of Artificial Sequence: Synthetic polynucleotide"
gcctccctcgcgccatcagagagtgtccagtccaacttgcctggcccagtacacctggctccccgctatccccagacagcagactcacctgaggagacggtgaccagggtgccctggccccagtgctggaagtatgtcgacagagtgtccagtccaatcagtgtaaaaattcatggttgtgtactcgttgctcaggtagctcagctgtagaagaaactgtgttttggatgtggatctggagatggtgactggactcttgaggcgtgggttgcgttgtgttctccctcatgacctgtgcacctgattcactccagtcccttccctggggagctgagggatccagctccagcaggaagcactggttgtgatggagaagcagagacagcacagatgagggagagggtctgtgagggcttcgccaggccaagaacgcacgagaaatacagatgtcggcatgcacagagtgtccagtccaactgagcgggctggcaaggc

SEQ ID NO: 1871 - DNA, 495 bp, Artificial Sequence
  source: /note="Description of Artificial Sequence: Synthetic polynucleotide"
gcctccctcgcgccatcagagagtgtcgtgtctaccttgcctggcccagtacacctggctccccgctatccccagacagcagactcacctgaggagacggtgaccagggtgccctggccccagtgctggaagtatgtcgacagagtgtcgtgtctactcaagtaatacaaggttgtggcattgttggtcacagaactcagctaaaagaaaatttggttcttggacgtggatctggagatggtgactgagctcatgaggagtgggttagaatttgtgctccctcgtgacctatgccctgatccactcccttgactgaggactggcggatccagctccagcaggaagcactagttgtgatggagaatccagagacagcacaggtgagggagggggtctgtgagggcctcaccaggccaataaatgaccatgaaacacagtggttggtgtgcatggcttctggagagtgtcgtgtctacctgagcgggctggcaaggc

SEQ ID NO: 1872 - DNA, 495 bp, Artificial Sequence
  source: /note="Description of Artificial Sequence: Synthetic polynucleotide"
gcctccctcgcgccatcagagagtgtcgtacagtgcttgcctggcccagtacacctggctccccgctatccccagacagcagactcacctgaggagacggtgaccagggtgccctggccccagtgctggaagtatgtcgacagagtgtcgtacagtgtcataaaaatacatggctgtgtgcttgtgactcacttagctcggctgtaggaagaactgctttttggacatggatctggagatggtgactggactcttgaggagtgggttggaatgtgcactccctcatgacctgtgcactggattcactccagtcccttcctggggggtttatgaatgcagctacagcaggaagcactggttgtgatggggaatccagagacagcacaggtgagggagagggtctgtgagggcttcaccaggccaagtgggcactgagaaacacagttgttggcatgcacagagagtgtcgtacagtgctgagcgggctggcaaggc

SEQ ID NO: 1873 - DNA, 495 bp, Artificial Sequence
  source: /note="Description of Artificial Sequence: Synthetic polynucleotide"
gcctccctcgcgccatcagagagtgtcggatcatccttgcctggcccagtacacctggctccccgctatccccagacagcagactcacctgaggagacggtgaccagggtgccctggccccagtgctggaagtatgtcgacagagtgtcggatcatctcatttaaaacatggctgtgagcttgttgctcacatagctccactgtaaaaacaagtgttttttggacccgaatttggagatggtgactggattcataaggagtgggtgggaatttttgctcccttcatgacgtgtgcgcctggtccactccagtccttcccatgtggactcgtggatccagctccagcaggaaacactggttgtgatggaaaatccagagacagcacaggtgagggagagggtctgcgagggctccaccaggccaagagtgcactaagaaacacagttgtttgtgagcacagagagtgtcggatcatcctgagcgggctggcaaggc

SEQ ID NO: 1874 - DNA, 495 bp, Artificial Sequence
  source: /note="Description of Artificial Sequence: Synthetic polynucleotide"
gcctccctcgcgccatcagagagtgtctattggcgcttgcctggcccagtacacctggctccccgctatccccagacagcagactcacctgaggagacggtgaccagggtgccctggccccagtgctggaagtatgtcgacagagtgtctattggcgtcatgaaaaatatatggctatgtgattgttgctcatgtagctcagctgtaggaagaactgtttttggacatggatctggggatggtgactggactcttgaggaaaggggagtaatgtgtgctcccttcatcatctatggacccaatccactccattccctcccagagagggggtgatggatgcagatccaggaggaagcactggttgtgatggagaatgcagagatgacacacatgagggagagggtctttgggggcttcaccaggccaagagtgcaccgagaaacacagttgttggcaggcaagagtgtctattggcgctgagcgggctggcaaggc

SEQ ID NO: 1875 - DNA, 495 bp, Artificial Sequence
  source: /note="Description of Artificial Sequence: Synthetic polynucleotide"
gcctccctcgcgccatcagagagtgtcaggcttgacttgcctggcccagtacacctggctccccgctatccccagacagcagactcacctgaggagacggtgaccagggtgccctggccccagtgctggaagtatgtcgacagagtgtcaggcttgatcaattaaaattcatggttgtgtacttgttgctcaggtagctcagctacaggaaacactgttttttggatgtggatctggagatagtgactggactcttgaggagtgggttggaatgtgcactccctcatgacctgtgcacctgattcgctccagtcccttccttgcggggggtgatggatgcagctccagcaggaagcactggttgtgatggagaatgcagagacagcacaggtgagagagagggtctgtgagagcttcactagcccaagagtgcaggagaaacacagttgttggcatgcacagagtgtcaggcttgactgagcgggctggcaaggc

SEQ ID NO: 1876 - DNA, 495 bp, Artificial Sequence
  source: /note="Description of Artificial Sequence: Synthetic polynucleotide"
gcctccctcgcgccatcagagagtgtcacacacgtcttgcctggcccagtacacctggctccccgctatccccagacagcagactcacctgaggagacggtgaccagggtgccctggccccagtgctggaagtatgtcgacagagtgtcacacacgttcagcttaaaaatacatggctatgtgcttgttgctcatgtagctcagctgtaggaagaactgcttttttggacacggatctggggatggtgactggacacttgaggagtgggtggtaatgtgtgctcccttcatgacctatgcacccaatccactccattcccttccctggggggctgatggatccagcttcagcaggaagacctcgttatcacggggaacacagacacagcgcaggtaagggagagggtctgtgagggcttcaccaggccaagagtgcgctgagaaacacagttgttggcatagagtgtcacacacgtctgagcgggctggcaaggc

SEQ ID NO: 1877 - DNA, 495 bp, Artificial Sequence
  source: /note="Description of Artificial Sequence: Synthetic polynucleotide"
gcctccctcgcgccatcagagagtgtctagacggacttgcctggcccagtacacctggctccccgctatccccagacagcagactcacctgaggagacggtgaccagggtgccctggccccagtgctggaagtatgtcgacagagtgtctagacggatcaagtaatacatgaccttgtccttggctttcagattggtcattgtaaggcagactgcacttaaaagggtgttgcttgagattgttaatttatttgtactcatggaaagtaaccctgagaattcatacttgatcactcactgttggcacccacacctatccctgttgtgaagcgtgctggaccaagctcatgctgtaaccagtaaaggtgaaaccagaggctttgcaggagagtctcaccactgggctgtaaattttttccccctctgactccatcagtaaacttcacacaggacttccgtgaagagtgtctagacggactgagcgggctggcaaggc

SEQ ID NO: 1878 - DNA, 495 bp, Artificial Sequence
  source: /note="Description of Artificial Sequence: Synthetic polynucleotide"
gcctccctcgcgccatcagagagtgtcgagcgatacttgcctggcccagtacacctggctccccgctatccccagacagcagactcacctgaggagacggtgaccagggtgccctggccccagtgctggaagtatgtcgacagagtgtcgagcgatatcaagtaatacactgcctactcctcagctttccagtagataattttaagggagattgtgatgttaagtgttgtccccaggaactgtgaatcttctttgtgctggagcagagcaccactgagaacttccacttgggtcactcatggctaccacccactccagcccctctcctccagccatcagggcccaataaatgctgcagtcagtgaaggtgaatcttgatgctttgcagaagaagctaagagaatagccaggctattttgccaaagacaaaaatatagatccagtaaacctttgtggttttagagtgtcgagcgatactgagcgggctggcaaggc

SEQ ID NO: 1879 - DNA, 495 bp, Artificial Sequence
  source: /note="Description of Artificial Sequence: Synthetic polynucleotide"
gcctccctcgcgccatcagagagtgtcgcatctgacttgcctggcccagtacacctggctccccgctatccccagacagcagactcacctgaggagacggtgaccagggtgccctggccccagtgctggaagtatgtcgacagagtgtcgcatctgatcaagtaatacacggacttttcctgagctctcaggttaatcatcttaaaagagaatctcctgaactgagtgtatttgaggattgttaatcatctttttactcaaggagagtcccactgagaacttctatttgaattattgttattacccacacccacccctgtcatgaagcctgctggatcaagcttatgctgttttcagtgaaagtgaatccagaggctttgcagaaaaggcagaattcctggtctgtagtatttctctgtctaactccattagttaacttcacaggggacttctgaaaacaagagtgtcgcatctgactgagcgggctggcaaggc

SEQ ID NO: 1880 - DNA, 495 bp, Artificial Sequence
  source: /note="Description of Artificial Sequence: Synthetic polynucleotide"
gcctccctcgcgccatcagagagtgtctgctacaccttgcctggcccagtacacctggctccccgctatccccagacagcagactcacctgaggagacggtgaccagggtgccctggccccagtgctggaagtatgtcgacagagtgtctgctacactcaagtattacaaggccttgtccttgactttcagtttggtccctttaaggtagactgcacatgaaaaggtgtcgcttgggactgttaatttatttgtactcatggagagtaactctgagaactcccacttgatcactcactgtttccacccacaccaatccctgtcatgaagcctgctggaccaagctcatgctgtagccagtaaaggtgaaatcagaggctttgcatgagagtctcagtgaaccactgggctgtacaattttcccccctgactctatcagtaaatttcacacaggacttctgagagtgtctgctacacctgagcgggctggcaaggc

SEQ ID NO: 1881 - DNA, 495 bp, Artificial Sequence
  source: /note="Description of Artificial Sequence: Synthetic polynucleotide"
gcctccctcgcgccatcagagagtgtcaactgccacttgcctggcccagtacacctggctccccgctatccccagacagcagactcacctgaggagacggtgaccagggtgccctggccccagtgctggaagtatgtcgacagagtgtcaactgccatcactgtaatatacggccttgcccttggctttcaggttggtccttgtaaggtagactgcacttgaaagggtgtcacttgggaatgttgatttatctgtactcatggagagtaacccttagaactcccatatgatctctcactgttgctacccacaccaattcctgttgtgaagcgtgctggaccaagctcatgctgcacccagtaaacccgaaaccagaggctttgcaggacagtctcagtgaactgctgggctgttaaatttttctccttctgactccatcagtaaacatcacacaggacttagagtgtcaactgccactgagcgggctggcaaggc

SEQ ID NO: 1882 - DNA, 495 bp, Artificial Sequence
  source: /note="Description of Artificial Sequence: Synthetic polynucleotide"
gcctccctcgcgccatcagagagtgtcttggactgcttgcctggcccagtacacctggctccccgctatccccagacagcagactcacctgaggagacggtgaccagggtgccctggccccagtgctggaagtatgtcgacagagtgtcttggactgtcaagtaatacacagacttgtcttgggctctcagttttattatcttaaaagagaatcttctgaacagtgtctctgaggactgttaatcttctttgtactgaaggcgagtcccattgagaacttccacttgaattactgttatctccctcaccaacacttgccatgaatcctgctggaccaaacttgttcttttttcagtgaatccaggggctttgcagaacagtctgagaattcttggtctgtagtattttcctgtctgactccactagttaacttcacagaggacttctgcacacacagaggagagtgtcttggactgctgagcgggctggcaaggc

SEQ ID NO: 1883 - DNA, 495 bp, Artificial Sequence
  source: /note="Description of Artificial Sequence: Synthetic polynucleotide"
gcctccctcgcgccatcagagagtgtctcggtactcttgcctggcccagtacacctggctccccgctatccccagacagcagactcacctgaggagacggtgaccagggtgccctggccccagtgctggaagtatgtcgacagagtgtctcggtacttcacagtaataaacggaattttcctgagctctcaggttaatcatcttaagagagaatcatctgaaaagcgtgtctctgaggactgttaatcttctttgtactcaaggagagtcccactgagaacttccacttgaattactgatgttatcacctacacccacccctgtcatgaagcctgctggaccaagcttatgctgttttcagtgaaagtgaatccacagggtttccagaaaagtctgagaattcttggtctgtagtatttctctgagagactccagtaattaacttcacaggggacctctgagagtgtctcggtactctgagcgggctggcaaggc

SEQ ID NO: 1884 - DNA, 495 bp, Artificial Sequence
  source: /note="Description of Artificial Sequence: Synthetic polynucleotide"
gcctccctcgcgccatcagagagtgtcccatggatcttgcctggcccagtacacctggctccccgctatccccagacagcagactcacctgaggagacggtgaccagggtgccctggccccagtgctggaagtatgtcgacagagtgtcccatggattcacacagttaaatgctgccatgttctgggttctcaggctgttcatttgcatgtacagcatgtacttggtgttgtctctggaagtggtgagtctgcccctaacatagtctgcattgtattgatgactttcactacgccatataactgcaacccattccagccccttccctgaggcctggcaaacccagtgaatctcatagatactgaaggtgaaccaagaggctgcacaggagagcctcaggggcccctctcagtgtaccaagtctcccccagactctgtaagctgggcctcaccctggatacagagtgtcccatggatctgagcgggctggcaaggc

SEQ ID NO: 1885 - DNA, 495 bp, Artificial Sequence
  source: /note="Description of Artificial Sequence: Synthetic polynucleotide"
gcctccctcgcgccatcagagagtgtcacgaagatcttgcctggcccagtacacctggctccccgctatccccagacagcagactcacctgaggagacggtgaccagggtgccctggccccagtgctggaagtatgtcgacagagtgtcacgaagattcacagtaatacactgcctacccctgtgagagccccctcagcttccaagtagattattttaagggagactgtgctggtaattggtgtccctgggaattgtgaatcttcattatgctgatgcagaatatcactgagaacttccacttgaatcaatcactgttaccacccactccagcctctgtcccccagccatctgggctcaatttatgctgtagtcagtgaaggtgaatcttgatgctttgcaaaagaggctaagagaacagccaggctgttttgccaaagataaaaatatagatccagtaaagagtgtcacgaagatctgagcgggctggcaaggc

SEQ ID NO: 1886 - DNA, 495 bp, Artificial Sequence
  source: /note="Description of Artificial Sequence: Synthetic polynucleotide"
gcctccctcgcgccatcagagagtgtcactgtggacttgcctggcccagtacacctggctccccgctatccccagacagcagactcacctgaggagacggtgaccagggtgccctggccccagtgctggaagtatgtcgacagagtgtcactgtggatcaacagtattacacaaccttgtccttggctttcaggttagtcattgtaaggtagagtgcacgtgaaagggtgtcgctggaccagttaatttatttgtactcatgaagagtaaacctgagcactcccacttgttgactcactgttgccagccaccacaatccctgttgtgaagcctgctggaccaacctcaggctgttgccagaaaaggtgaatccagacgctttgcaagaaagtctcagtgaaccactgggctgtactacgtttacccctctgactccaccactgaacttcatacaggacttagagtgtcactgtggactgagcgggctggcaaggc

SEQ ID NO: 1887 - DNA, 495 bp, Artificial Sequence
  source: /note="Description of Artificial Sequence: Synthetic polynucleotide"
gcctccctcgcgccatcagagagtgtcggtgtcatcttgcctggcccagtacacctggctccccgctatccccagacagcagactcacctgaggagacggtgaccagggtgccctggccccagtgctggaagtatgtcgacagagtgtcggtgtcattcaagtaatacatggccttctcctcggctctcaggttggtcattttgagggagactgtgctgacaagggtgtccctgaggattatgatttttctttgtattgatggagggtaccactaacaaattccacttgaatccctcgcttttgcctcccacaccaacccctgtcctgaagcctgctgggctgagctcatgctagagtcaatgaaggtaaattcagaggctttgtaaaaaaggctctgagaacagttaggctgtatcatttctcttccagattccaccagtgaacttcttgtaggactctagagtgtcggtgtcatctgagcgggctggcaaggc

SEQ ID NO: 1888 - DNA, 495 bp, Artificial Sequence
  source: /note="Description of Artificial Sequence: Synthetic polynucleotide"
gcctccctcgcgccatcagagagtgtctcgtgaagcttgcctggcccagtacacctggctccccgctatccccagacagcagactcacctgaggagacggtgaccagggtgccctggccccagtgctggaagtatgtcgacagagtgtctcgtgaagtcacagtaatacaaggtcttgtccttggctttcacattggtcattttaaggtagactgcacttgaaagggtgttgcttgggactgttaatttacttgtactcatggagagtaaccctgataactcactgttgccacccacacaaatccctgtcatgaagcctgctggaccaagctcatgctgtagccagtacaagtgaaatcagaggctttgcaggagagtctgtgagaaccgctgggctgtacaatgtttccccctctgactccatcagtaagcttcaacaggacttacatgaacacagaggagagtgtctcgtgaagctgagcgggctggcaaggc

SEQ ID NO: 1889 - DNA, 495 bp, Artificial Sequence
  source: /note="Description of Artificial Sequence: Synthetic polynucleotide"
gcctccctcgcgccatcagagagtgtccactagctcttgcctggcccagtacacctggctccccgctatccccagacagcagactcacctgaggagacggtgaccagggtgccctggccccagtgctggaagtatgtcgacagagtgtccactagcttcacacagtaatacacgcctgcatccccagccatcacacttctcagctgtaagttttcttgttttttactatgtgtttctggagatgctagctctgccctgaaggttggggcttagtgtttcccttaacccatatcacaccaacacactgaagaccttttgatgggagatggtggatccaggaaacagaatgttcagaaattgaatgtgcataggcggcataggtgaggctgagcatgaccaaggggaccactacttcttcctcccattgcacaaggtggtcctcactgtgaacccctgagaaagagtgtccactagctctgagcgggctggcaaggc

SEQ ID NO: 1890 - DNA, 495 bp, Artificial Sequence
  source: /note="Description of Artificial Sequence: Synthetic polynucleotide"
gcctccctcgcgccatcagagagtgtcggtcaactcttgcctggcccagtacacctggctccccgctatccccagacagcagactcacctgaggagacggtgaccagggtgccctggccccagtgctggaagtatgtcgacagagtgtcggtcaacttcagcacagtagtacacatctatgtcctcagatctctgactgctcagctccatgtaggctgtgctcgtggacgtgtccctggtcatggtgactctgccctgaaacttctgtgcatagcctgtgttaccattgccagagtagctccctaccatccattcaaacccttatccaggggcctgtcacacacagtgaatgtcgtagctggcgaaggtgtatccagagctttgcaggagaccttcactgaggccatggacgctggcaacaggagagtcatcagaagctgggtgagtcatataatcaggaagagtgtcggtcaactctgagcgggctggcaaggc

SEQ ID NO: 1891 - DNA, 495 bp, Artificial Sequence
  source: /note="Description of Artificial Sequence: Synthetic polynucleotide"
gcctccctcgcgccatcagagagtgtctacgtacgcttgcctggcccagtacacctggctccccgctatccccagacagcagactcacctgaggagacggtgaccagggtgccctggccccagtgctggaagtatgtcgacagagtgtctacgtacgtcaacaggaatacacgaccatgtcttcagatctcaggctgctcagctccatgtaggctgtgctcacggacctgtcactggtaatggtgactctgccccggaacttctgtgcgtagtgtgtgttatcattgtaagggttgatgcatcccaaccactatgcccttgtccagggccctgtcgcacccactgtgtaaagtatttggtgaaggtgtatctggaagcctggccaggagaccttcactgaggacgcaggcttcttcacctcagccccaggctgcaacagctgaacctgggaatggacatcagagtgtctacgtacgctgagcgggctggcaaggc

SEQ ID NO: 1892 - DNA, 495 bp, Artificial Sequence
  source: /note="Description of Artificial Sequence: Synthetic polynucleotide"
gcctccctcgcgccatcagagagtgtcatgacacccttgcctggcccagtacacctggctccccgctatccccagacagcagactcacctgaggagacggtgaccagggtgccctggccccagtgctggaagtatgtcgacagagtgtcatgacacctcacacagtaatacatggccgtgtcttcagatctcaggctgctcagctccatgtaggctgtgctcgtggatgtgtccctggtcatggtgactctgccctggaacttctctgcgtagcttatgctgccatcactagggcacatccttcccatccactcaagcccttgtgcatgggcctggcgcacctagtgcatagagtaactggtgaaggtaggtgtatccacaagtcttgcaggagactttcactgatgccccagccttcttcatctcatccccagactgcaccagctgcacctgggactggagagtgtcatgacaccctgagcgggctggcaaggc

SEQ ID NO: 1893 - DNA, 495 bp, Artificial Sequence
  source: /note="Description of Artificial Sequence: Synthetic polynucleotide"
gcctccctcgcgccatcagagagtgtccttcacgacttgcctggcccagtacacctggctccccgctatccccagacagcagactcacctgaggagacggtgaccagggtgccctggccccagtgctggaagtatgtcgacagagtgtccttcacgatcacccagtaatacacagccgagtcctcagatctcaggctgctcagctctatgtaggctgtcctcagggacatgtccctggtaatggtgactctgccctggaacttctttgcatagttggtgttaccattgtaaagtgtgatccatctcatcctttcaagcccttgtccaggggcctgttgcaaccagtgcaaggagcagcaagtgaaggtgtatccggaagccttgcaggagaccttcactgaggccccaggcttctttacctcagcctcagactgccccagctgcacctgggagcagacacagagtgtccttcacgactgagcgggctggcaaggc

SEQ ID NO: 1894 - DNA, 495 bp, Artificial Sequence
  source: /note="Description of Artificial Sequence: Synthetic polynucleotide"
gcctccctcgcgccatcagagagtgtcagaatcagcttgcctggcccagtacacctggctccccgctatccccagacagcagactcacctgaggagacggtgaccagggtgccctggccccagtgctggaagtatgtcgacagagtgtcagaatcagtcacacagtaatacacgaccatgtcttcagatctcaggctgctcagctccatgtaggctgtgctcatggacctgtcactggtaatggtgactctgccccagaacgtctgtgcatagtgtgtgttatcattgtaagggttgattcatcccatccactatgcccttgtccagggctttgtcacacccaccgtgtaaagtatttggtgaaggtgtatctggaagcctggcaggagaccttcactgaggacccaggcttcttcacctcagccccaggctgcaacagctgaacctgggaatggacaccagagtgtcagaatcagctgagcgggctggcaaggc

SEQ ID NO: 1895 - DNA, 495 bp, Artificial Sequence
  source: /note="Description of Artificial Sequence: Synthetic polynucleotide"
gcctccctcgcgccatcagagagtgtcagttatgccttgcctggcccagtacacctggctccccgctatccccagacagcagactcacctgaggagacggtgaccagggtgccctggccccagtgctggaagtatgtcgacagagtgtcagttatgctcatgcacagtaatgtgtggctgtgtccacaatgtccatgttgatcactgttagaaccacttcattcttggaggtgtccttggagataatgagcctactcttcagagatgggctgtagtatttattatcattctaataaatgtgtgcaagccactccagggcctttgctgagggctgacagatctaacccacacccattccagaagtgctgagtgagaacccagagaaggtgcaggtcagcatgagggtctgtgtgggtttcaccagtgcaggaccagactccttcaaggtgacctgggataaagagtgtcagttatgcctgagcgggctggcaaggc

SEQ ID NO: 1896 - DNA, 495 bp, Artificial Sequence
  source: /note="Description of Artificial Sequence: Synthetic polynucleotide"
gcctccctcgcgccatcagagagtgtcaggtctcacttgcctggcccagtacacctggctccccgctatccccagacagcagactcacctgaggagacggtgaccagggtgccctggccccagtgctggaagtatgtcgacagagtgtcaggtctcatcacagagtcatatgcagctgcatcctctgccctcagtctgttcatttgcagatacagtgagtttttggtattgtctctggaaatggtgaatcggcccttcacagagtctgcgtagtacatggtactaccactaccactaataactgggacccactgcagacccttccctggagcctgggggacccagtgcgtgctatggctactgaaggtgaatccagaggctgcacaggagagtctcagggacacccaggctttgtcaagtttgctccagactctaccagctgcatctcacactggacaccagagtgtcaggtctcactgagcgggctggcaaggc

SEQ ID NO: 1897 - DNA, 495 bp, Artificial Sequence
  source: /note="Description of Artificial Sequence: Synthetic polynucleotide"
gcctccctcgcgccatcagagagtgtcgtcatagtcttgcctggcccagtacacctggctccccgctatccccagacagcagactcacctgaggagacggtgaccagggtgccctggccccagtgctggaagtatgtcgacagagtgtcgtcatagttcacacagtaatacacagccatgtcctcgggcctcaggctgttcatttgctgatacaggaagttcctggaattgtctctggagatgatgaatcggcccttcacagagtctgcatagtgcgtcctactgccattccaactaacacccgatacccactccagcccctttcctggagcctggcggacccagttcatgtcactgttactgaaggtgaatccagaggctgcacaggagagtctcagggaccccccaggctctaccaagcctcccccagactccaccagctgcactgttgtacccaggtagagtgtcgtcatagtctgagcgggctggcaaggc

SEQ ID NO: 1898 - DNA, 495 bp, Artificial Sequence
  source: /note="Description of Artificial Sequence: Synthetic polynucleotide"
gcctccctcgcgccatcagagagtgtcgtgacttgcttgcctggcccagtacacctggctccccgctatccccagacagcagactcacctgaggagacggtgaccagggtgccctggccccagtgctggaagtatgtcgacagagtgtcgtgacttgtcaacagtaatacacggccgtgtcctcggttttcaggctcttcatttgcagataggtgatgcttttggaatcatctcttgagattgtgaatctgcctttcacagacgtggtctattctgttgtcccaccattagctttgtttctaatgaaacctacccattccagccccttcccgggagcctggcggaccccgctcatgtagtagtaactgaaggtgaatccagaggctgcacaggagagtctcagggaccccccaggctgtaccaagcctcccccagactccaccagctgcacctcacactgagagtgtcgtgacttgctgagcgggctggcaaggc

SEQ ID NO: 1899 - DNA, 495 bp, Artificial Sequence
  source: /note="Description of Artificial Sequence: Synthetic polynucleotide"
gcctccctcgcgccatcagagagtgtcgattgcagcttgcctggcccagtacacctggctccccgctatccccagacagcagactcacctgaggagacggtgaccagggtgccctggccccagtgctggaagtatgtcgacagagtgtcgattgcagtcaacactaatagagggccgtgtcctcggttttcaggctgttcatttgcagatgaagtgtgttcttggcgttatctctggaggtattgaatcggtccttaccggagtctatgaggtatgtgctacccccattaggattaacttgtcaaaccaactccagcccattccctggagcctggcggacacagttcatgtagtagctactgaaggtgaattgagaggctgcacaggagagtctcggggaccacgcaggctttgccaagcctcccccagactccaccagctgcatctcacactggataccagagtgtcgattgcagctgagcgggctggcaaggc

SEQ ID NO: 1900 - DNA, 495 bp, Artificial Sequence
  source: /note="Description of Artificial Sequence: Synthetic polynucleotide"
gcctccctcgcgccatcagagagtgtcactatgaccttgcctggcccagtacacctggctccccgctatccccagacagcagactcacctgaggagacggtgaccagggtgccctggccccagtgctggaagtatgtcgacagagtgtcactatgactcatgtacagccatacacagccatgtcctcagttctctgactgttcatttgcagatacagagagttcttagcattgtctttggagatggagaatctgcccttcacagagtctgcatggtgtatctgacttccatcatcttttatatctattactcactccagccccttgcctgcagactggtgaactgggctcattcagaagctactgaaggcgaatctagaggctacacaggagagtctcaggaacttcccaggttgtctcaggtcctctgtgggctctatcagctccacctcacactgaacagagtgtcactatgacctgagcgggctggcaaggc

SEQ ID NO: 1901 - DNA, 495 bp, Artificial Sequence
  source: /note="Description of Artificial Sequence: Synthetic polynucleotide"
gcctccctcgcgccatcagagagtgtcatggtcaacttgcctggcccagtacacctggctccccgctatccccagacagcagactcacctgaggagacggtgaccagggtgccctggccccagtgctggaagtatgtcgacagagtgtcatggtcaatcacatacagtaacacacagctgtgcccgctgctctcagactgttcattagcaaatacagtgagttcttggcattttctttggagatggtgaatttgctcttcaaagattatgcataacatatctgacttccatcacactgtatatctactactcactccagccccttccctggagcctgggaaaccgagttccttcagtagctactgaaggttaatccagagtctgcacaggagagtctcagggatcccccaggttgtcttgggtcctctccggactccacgagctgtacctctcactagacagagtgtcatggtcaactgagcgggctggcaaggc

SEQ ID NO: 1902 - DNA, 495 bp, Artificial Sequence
  source: /note="Description of Artificial Sequence: Synthetic polynucleotide"
gcctccctcgcgccatcagagagtgtcgatggcttcttgcctggcccagtacacctggctccccgctatccccagacagcagactcacctgaggagacggtgaccagggtgccctggccccagtgctggaagtatgtcgacagagtgtcgatggctttcatgtatagccatacacggccacgtcctcagctctctgagtgttcatttgcagatacagagagttcttagcattgtctttggagatggagaatctgcccttcacagagtctgcatggtgtatctgacttccatcatcttttatatctattactcactccagccccttgcctggagactggtgaactcggctcattcagaagctactgaaggcgaatctagaggctacacaggagagtctcaggaacttcccaggttgtctcaggtcctctatggactctatcagctccacctcacactgaacagagtgtcgatggcttctgagcgggctggcaaggc

SEQ ID NO: 1903 - DNA, 495 bp, Artificial Sequence
  source: /note="Description of Artificial Sequence: Synthetic polynucleotide"
gcctccctcgcgccatcagagagtgtcagcatatgcttgcctggcccagtacacctggctccccgctatccccagacagcagactcacctgaggagacggtgaccagggtgccctggccccagtgctggaagtatgtcgacagagtgtcagcatatgtcacatacagtaacacacagctgtgccctctgctctcagactgttcatttgcaaatacagtgagttcttggcattttctttggagatggtgaatttgctcttcacagattgggcataacatatctgacttccatcacactgtatatctactactcactccagccccttccctggagcctgggaaaccgagctcattcagtagctactgaaggttaatccagagtctgcacaggagagtctcaaggatcccccaggttgtcttgggtcctctccggactccacgagctgtacctctcactagacagagtgtcagcatatgctgagcgggctggcaaggc

SEQ ID NO: 1904 - DNA, 495 bp, Artificial Sequence
  source: /note="Description of Artificial Sequence: Synthetic polynucleotide"
gcctccctcgcgccatcagagagtgtccatatgctcttgcctggcccagtacacctggctccccgctatccccagacagcagactcacctgaggagacggtgaccagggtgccctggccccagtgctggaagtatgtcgacagagtgtccatatgcttcaagtaatacacagacctatcctcggctctgacgctgttcatttgcagatacagtgatttcttggcatcatctctggagagggtgaatcgacccttcacagagtctgcatagcttgtgctacctacacaacaactcataaatgagacctactccagccctttcccaggagcctgatggacccagctcatccagtacctaataaaggtactaaaggtgaatccagaggctgcaaaagaaagtctcagggacccccaggctataacaagcctcccaaagactccaccagctgcacctcacactgagagtgtccatatgctctgagcgggctggcaaggc

SEQ ID NO: 1905 - DNA, 495 bp, Artificial Sequence
  source: /note="Description of Artificial Sequence: Synthetic polynucleotide"
gcctccctcgcgccatcagagagtgtctcgtcgatcttgcctggcccagtacacctggctccccgctatccccagacagcagactcacctgaggagacggtgaccagggtgccctggccccagtgctggaagtatgtcgacagagtgtctcgtcgattcaacacagccgagtcctcatctctcagactgttcatttgcaagtacagcatgttcttgccattgtctctagagatggtgaatctacccttcagtgtctgcatagtataggctaccaccactagcactaatgtatgagacccattccagcccctttcttgaagcccggtgggcccagttcatgtcattgcttctcaagatgaatccgcaggctgcacatgagagtctcaggacacccccaaccccaccacagctgtaccaagtctcccccagactctaccagctgcacctcatactgcacaccagagtgtctcgtcgatctgagcgggctggcaaggc

SEQ ID NO: 1906 - DNA, 495 bp, Artificial Sequence
  source: /note="Description of Artificial Sequence: Synthetic polynucleotide"
gcctccctcgcgccatcagagagtgtccagtctgtcttgcctggcccagtacacctggctccccgctatccccagacagcagactcacctgaggagacggtgaccagggtgccctggccccagtgctggaagtatgtcgacagagtgtccagtctgttcaagtaatacatggccgtgtccttagctttcagactgtccatttgcagatagagcatgctcttagaattgtctcggagattgtgaatcggcccttcacagagtctgcatagtatttctgacttccatcattccagatatgtgccactcactccagccccttccctggagcctggcggacccagctcatgccatagctactaaaggagaatcctgaggctgcacaggagagtctcagggaccccccaggctggaccaagcctcccccagactccaccagctgcacctcacactggacacctgcagagtgtccagtctgtctgagcgggctggcaaggc

SEQ ID NO: 1907 - DNA, 495 bp, Artificial Sequence
  source: /note="Description of Artificial Sequence: Synthetic polynucleotide"
gcctccctcgcgccatcagagagtgtcaacgcgtacttgcctggcccagtacacctggctccccgctatccccagacagcagactcacctgaggagacggtgaccagggtgccctggccccagtgctggaagtatgtcgacagagtgtcaacgcgtatcagtacagtaatagatggccgtgtactcggttttcagggtattcacttgcagatacagtgtgttctttgaatcatctcttgagatggtgaacctgcctttcacagatgcagcgcattctgtcgtgtaactgttacgtttggttctaatacggccaacccactccagccctttcccagaagcctggcggatccagtgcattcagaagtcactgaaggtgaatctagaagctgcaaatgagagtctcggggacccacccaggctgtaccaagcctcccccagactccaccagctgcgcctcacgagagtgtcaacgcgtactgagcgggctggcaaggc

SEQ ID NO: 1908 - DNA, 495 bp, Artificial Sequence
  source: /note="Description of Artificial Sequence: Synthetic polynucleotide"
gcctccctcgcgccatcagagagtgtcgtagttcgcttgcctggcccagtacacctggctccccgctatccccagacagcagactcacctgaggagacggtgaccagggtgccctggccccagtgctggaagtatgtcgacagagtgtcgtagttcgtcaacaataatacacagccatgtcctcagctatcaggctgttcatttgaagatacaaggacttcttggcgttgtctctggagatggtgaatcggcccatcacggagtctgcatagtatgtatcaccaccagtaccaatagctgatacccactccggacccttccctggagcccggcgaacccagtgcagaacatagctactgaaggcgaatccagaggctgcacaggagggtctcagggaccccccaggctgtaccaagcctcccccagactccaccagctgatcctcacactggacacctgcagagtgtcgtagttcgctgagcgggctggcaaggc

SEQ ID NO: 1909 - DNA, 495 bp, Artificial Sequence
  source: /note="Description of Artificial Sequence: Synthetic polynucleotide"
gcctccctcgcgccatcagagagtgtccgaactaccttgcctggcccagtacacctggctccccgctatccccagacagcagactcacctgaggagacggtgaccagggtgccctggccccagtgctggaagtatgtcgacagagtgtccgaactactcatgactcaataatacagagccatattctcagctctcagactgttcatttgcagatacaacctgtgcttggcattgtctttggagatggtgaatctgaccttcacagagtctgcatattatgtctgacttccatcgtacattatatctactactcactgcagcccctttcctggagcctggcagattcagctgatctagtagctacagaaggtggattcagaggatgcacggcagagtctcaggcacattcagcttgtgccaactctccccaagactccaccatctgcaccccacactagacagagtgtccgaactacctgagcgggctggcaaggc

SEQ ID NO: 1910 - DNA, 495 bp, Artificial Sequence
  source: /note="Description of Artificial Sequence: Synthetic polynucleotide"
gcctccctcgcgccatcagagagtgtcttaacgtccttgcctggcccagtacacctggctccccgctatccccagacagcagactcacctgaggagacggtgaccagggtgccctggccccagtgctggaagtatgtcgacagagtgtcttaacgtctcaacagtaatacacggtcatgtcctcagctctcaggctgttcacttgcagatagagggagttcttggcattgtctctggagatggtcaatcggcccttcacagagtctacatagtatttctcacttccgtcacactttatgtcggccacccactccagccccttctccggagcctggcagacccagtgcatccaggagctactgaaggtgaatccagaggctgcacaggagagtctcagggaccctccaggctgtaccaagcctcacccagactccaccagctgcacctcacactggacaccagagtgtcttaacgtcctgagcgggctggcaaggc

SEQ ID NO: 1911 - DNA, 495 bp, Artificial Sequence
  source: /note="Description of Artificial Sequence: Synthetic polynucleotide"
gcctccctcgcgccatcagagagtgtcagcaacctcttgcctggcccagtacacctggctccccgctatccccagacagcagactcacctgaggagacggtgaccagggtgccctggccccagtgctggaagtatgtcgacagagtgtcagcaaccttcacatacagtaatacacggccgtgccctctgctctcagactgttcatttgcaaacagagtgagttcttggcattttctttggagatggtgaatctgctcttcacagattgtgcataacatagctgacttctatcctactatatatctactactcactccagccccttccctggagcctgggaatctgagctcattcagtagctactgaaggttaatccagagtctgcacaggagagtctcagggatcccccaagttgtctttggttttcttcagactccaccagctgtacctcacactggacagagtgtcagcaacctctgagcgggctggcaaggc

SEQ ID NO: 1912 - DNA, 495 bp, Artificial Sequence
  source: /note="Description of Artificial Sequence: Synthetic polynucleotide"
gcctccctcgcgccatcagagagtgtcttctcgagcttgcctggcccagtacacctggctccccgctatccccagacagcagactcacctgaggagacggtgaccagggtgccctggccccagtgctggaagtatgtcgacagagtgtcttctcgagtcaacagtaatacacagccttgtccttggctttcaggttggtcattgtaaggtagactgcacatgaaaaggtgtcgcttgggactgttaatttatttgtactcatggagagtaactctgagaactcccacttgatcactcactgtttccacccacaccaatccctgtcatgaagcctgctggaccaagctcatgctgtagccagtaaaggtgaaatcagaggctttgcaggagagtctcagtgaaccactgggctgtacaattttctgcctctgactccatcaataaacttcacacaggacttagagtgtcttctcgagctgagcgggctggcaaggc

SEQ ID NO: 1913 - DNA, 495 bp, Artificial Sequence
  source: /note="Description of Artificial Sequence: Synthetic polynucleotide"
gcctccctcgcgccatcagagagtgtcactctacgcttgcctggcccagtacacctggctccccgctatccccagacagcagactcacctgaggagacggtgaccagggtgccctggccccagtgctggaagtatgtcgacagagtgtcactctacgtcaacacagtaatacacagccatgtcgtcggctctcaggctgttcatttgcagatacagtgaattctgggcattgtctctagagatggtgaatcagcccttcacagagtctgtgtagagtacggtatcaccacttgtactaataactgagacccactccaaaccctttcctggagcctggtggacccagtgcatagcagagctactgaaggtgaatccagaggctgcacaggagagtctcagagaccctcccagtctttactaagcctcccccagactccaccagctgcacctcacactggacagagtgtcactctacgctgagcgggctggcaaggc

SEQ ID NO: 1914 - DNA, 495 bp, Artificial Sequence
  source: /note="Description of Artificial Sequence: Synthetic polynucleotide"
gcctccctcgcgccatcagagagtgtctaccggaacttgcctggcccagtacacctggctccccgctatccccagacagcagactcacctgaggagacggtgaccagggtgccctggccccagtgctggaagtatgtcgacagagtgtctaccggaatcaacagtagtacacaactgtgccctcggctctcaggctgttcatttgcagagacagtgaattctgggcattgtctctggagatggtgaatcggcccttcacagagtctgtgtagagtacggtatcaccacttgtactaataactgagacccactacaaaccctttcttggagcctggcggacccagtgcatagcagagctactgaaggtgaatccagaggctgcacaggagagtctcagggaccccccaggctggaccaagccttccccagactccaccagctgcacctcacactggacaccagagtgtctaccggaactgagcgggctggcaaggc

SEQ ID NO: 1915 - DNA, 495 bp, Artificial Sequence
  source: /note="Description of Artificial Sequence: Synthetic polynucleotide"
gcctccctcgcgccatcagagagtgtccgaattgccttgcctggcccagtacacctggctccccgctatccccagacagcagactcacctgaggagacggtgaccagggtgccctggccccagtgctggaagtatgtcgacagagtgtccgaattgctcatgtacagccatgcatggtcatgtcctcagctctcagactgttcgtttggagatacggtgagttcttagcattgtctttggagatggtgaatctgcccttcacagagtctgcatggtatatctgacttccatcatattttacatctattactccctccagccccttccctagagtctcattgacccagctcattcagtagctactgaaggtgaatccagaggctacacaggagagtctcaggaacttcccaagttgtctcaggccctctatggactctatcagctccacctcacactgaacagagtgtccgaattgcctgagcgggctggcaaggc

SEQ ID NO: 1916 - DNA, 495 bp, Artificial Sequence
  source: /note="Description of Artificial Sequence: Synthetic polynucleotide"
gcctccctcgcgccatcagagagtgtcttcgctcacttgcctggcccagtacacctggctccccgctatccccagacagcagactcacctgaggagacggtgaccagggtgccctggccccagtgctggaagtatgtcgacagagtgtcttcgctcatcagtatagtaatacacggccgtgtcctcggttttcaggctgttcatttgcagataggcgatgcttttggaatcatcgcttgagatggtgaatctgcctttcacagacgcggcgtattctgttgttccacgattagttttgtttttagtgaaacctacccactccagcccctttcctggagcccggcagatccactgcatgcagtagttaacggaaggtgaatccagaggctgcacaggagagtctcagggaccccccaggctgtaccaagcctcccccagactccaccagctgcacctcacaagagtgtcttcgctcactgagcgggctggcaaggc

SEQ ID NO: 1917 - DNA, 495 bp, Artificial Sequence
  source: /note="Description of Artificial Sequence: Synthetic polynucleotide"
gcctccctcgcgccatcagagagtgtcgacgttaacttgcctggcccagtacacctggctccccgctatccccagacagcagactcacctgaggagacggtgaccagggtgccctggccccagtgctggaagtatgtcgacagagtgtcgacgttaatcaacagtaatacacggccgtgtcctcggctctcaggctgttcatttgcagataggtgatgcttttggaatcatctcttgagattgtgaatctgcctttcacagacgtggtctattctgttgtcccaccattagctttgtttctaatgaaacctacccactccagccccttcccgggagcctggcggacccagctcatgtagtagtcactgaaggtgaatccagaggctgcacaggagagtctcagggaccccccaggctggaccaagcctcccccggactccaccagctgcacctcacactgagagtgtcgacgttaactgagcgggctggcaaggc

SEQ ID NO: 1918 - DNA, 495 bp, Artificial Sequence
  source: /note="Description of Artificial Sequence: Synthetic polynucleotide"
gcctccctcgcgccatcagagagtgtccgtagagtcttgcctggcccagtacacctggctccccgctatccccagacagcagactcacctgaggagacggtgaccagggtgccctggccccagtgctggaagtatgtcgacagagtgtccgtagagttcacacagtaatacgtggctgtgtactcagctctcaaactgttcatttccagataagagtgtgttcttggcattgtttctggagatggggaatcagaacttcccagaatgtgcatagcgtatgctactcccatcagtactaatacatgagacccactccagtctgttccctggagcctggcaggcccagtgcatccagtggctactgaaggcaaatccagaggctgcacaggacagtctcagggacccccacccccaccgcgccaggctgtaccaagtctcccccaggctccaacaactgcgcagagtgtccgtagagtctgagcgggctggcaaggc

SEQ ID NO: 1919 - DNA, 495 bp, Artificial Sequence
  source: /note="Description of Artificial Sequence: Synthetic polynucleotide"
gcctccctcgcgccatcagagagtgtcttccggtacttgcctggcccagtacacctggctccccgctatccccagacagcagactcacctgaggagacggtgaccagggtgccctggccccagtgctggaagtatgtcgacagagtgtcttccggtatcacagtaatagacggccatggtgtcagcaatgaaactgtttatttgcagatacagtgagttcttggtgttttctctggagatggtcaaccggcccttcacagagtctgagtagtatatgcctccaccactagcattaatgtaagacccactccagtcccttccctggagcttggtccacctagtgcatgccatagttactgaaagtgtatccagaggctgcacaggagagtcacatggaccccccaagctgtaccaagcctcccccagactctaccagctacacttcacattggacacctgcagagtgtcttccggtactgagcgggctggcaaggc

SEQ ID NO: 1920 - DNA, 495 bp, Artificial Sequence
  source: /note="Description of Artificial Sequence: Synthetic polynucleotide"
gcctccctcgcgccatcagagagtgtcgcaattcgcttgcctggcccagtacacctggctccccgctatccccagacagcagactcacctgaggagacggtgaccagggtgccctggccccagtgctggaagtatgtcgacagagtgtcgcaattcgtcacatacagtaacacacagctgtgccctctgctctcagactgttcatttgcaaatacagtgagttcttggcattttctttggagacggtgaatctgctcgtcacagattgtgcataacatatctgacttccatcacactgtatatctactactcactccagccccttccctggagcctgggaaaccgagctcattcagtagctactgaaggttaatccagaggctgcacaggagagtctcagggaacccaggttgtcttgggtcctctccagactccaccagctgtacctcacactggacacagagtgtcgcaattcgctgagcgggctggcaaggc

SEQ ID NO: 1921 - DNA, 495 bp, Artificial Sequence
  source: /note="Description of Artificial Sequence: Synthetic polynucleotide"
gcctccctcgcgccatcagagagtgtctgagcgaacttgcctggcccagtacacctggctccccgctatccccagacagcagactcacctgaggagacggtgaccagggtgccctggccccagtgctggaagtatgtcgacagagtgtctgagcgaatcaacagtaatacacagccgtgtcctcggctctcaggctgttcatttgcagatacagtgagttcttggcgttgtctctggagatggtgaatcggcccttcacagagtctgcgtagtatatggtactactactactaatggatgagacccactccagccccttccctggagcctggcggacccagttcatgtagtagtcactgaaggtgaatccagaggctgcacaggagagtctcagggaccccccaggctttaccaagcctcccccagactccaccagctgcacctcacactggacacctgcagagtgtctgagcgaactgagcgggctggcaaggc

SEQ ID NO: 1922 - DNA, 495 bp, Artificial Sequence
  source: /note="Description of Artificial Sequence: Synthetic polynucleotide"
gcctccctcgcgccatcagagagtgtctactaagccttgcctggcccagtacacctggctccccgctatccccagacagcagactcacctgaggagacggtgaccagggtgccctggccccagtgctggaagtatgtcgacagagtgtctactaagctcaacagtaatacacggccgtgtccgcggcggtcacagagctcagcttcaggtagaactggttcttggacgtgtctacggacatggtgattcgactcttgagggacgggttgtagtaggtgctcccactatgatggatttccccaatccactccagccccttccctgggggctggcggacccagattcaccagttaccactgctgatggagtcaccagagacagcgcagatgagggacagggtctccgaaggcttcaccagtcctgggcccgactcctgcagctgcacctgggacaggaccccagagtgtctactaagcctgagcgggctggcaaggc

SEQ ID NO: 1923 - DNA, 495 bp, Artificial Sequence
  source: /note="Description of Artificial Sequence: Synthetic polynucleotide"
gcctccctcgcgccatcagagagtgtctggcgtatcttgcctggcccagtacacctggctccccgctatccccagacagcagactcacctgaggagacggtgaccagggtgccctggccccagtgctggaagtatgtcgacagagtgtctggcgtattcactgcgcccgccccctccgcctccctgcggtcacagagctcagcttcagggaaaactggttcttggacgtttctattgacatggtgactcaactcctgagggacggggtgtagtagctcctcccactataatagatgtatccaatccattccagccccttccctggggactggcggaccagctccaccagttaccactgctgatggagtcaccagagacagcgcatgtgagggacagggtctccgaagcttcaccagtcctgggccccactcctgcagctgcactgggacaggacccctgtagagtgtctggcgtatctgagcgggctggcaaggc

SEQ ID NO: 1924 - DNA, 495 bp, Artificial Sequence
  source: /note="Description of Artificial Sequence: Synthetic polynucleotide"
gcctccctcgcgccatcagagagtgtcgataaccacttgcctggcccagtacacctggctccccgctatccccagacagcagactcacctgaggagacggtgaccagggtgccctggccccagtgctggaagtatgtcgacagagtgtcgataaccatcattagatggtccctctcacacaataatacatggcggcgtccgaggccttcaggctgctccactgcaggtaggcggtgctgctggagctgtcggctgagatggtgacgtggccttggaaggatgggctgtatctggtatcagagttcccaggatagatgctccccatccactccagttctttcccgggcatctggcgcacccagtggatccagtagctggtaaagctgtatccagaagtcttacaggagatcctcagagactccccgggtcttttcacctctgctgcagactgcaacagctgagagtgtcgataaccactgagcgggctggcaaggc

SEQ ID NO: 1925 - DNA, 495 bp, Artificial Sequence
  source: /note="Description of Artificial Sequence: Synthetic polynucleotide"
gcctccctcgcgccatcagagagtgtcctagtgaacttgcctggcccagtacacctggctccccgctatccccagacagcagactcacctgaggagacggtgaccagggtgccctggccccagtgctggaagtatgtcgacagagtgtcctagtgaatcagcacgtgtcctcagcctttaggctgctgatatgaagatatgccatgctgacggaggtgtccatggagaagacaaaccgtcctgtgaagccctgggcatacgttaggttcccagtgttggtgttgatccatcccatttcctcaagcccttgtccatgggcctgtcatacccagctgatagcatagcttgtgaaggtgtatccagaagccttgcaggaaaccttcaatgaggctccaggcttcttcacctcaggcccagactgcaccagctgcacctgtgagtggacacctgtggagaggagagagtgtcctagtgaactgagcgggctggcaaggc

SEQ ID NO: 1926 - DNA, 495 bp, Artificial Sequence
  source: /note="Description of Artificial Sequence: Synthetic polynucleotide"
gcctccctcgcgccatcagagagtgtcacgttcaccttgcctggcccagtacacctggctccccgctatccccagacagcagactcacctgaggagacggtgaccagggtgccctggccccagtgctggaagtatgtcgacagagtgtcacgttcactcaacagtaatactcggccgtgtcctcagcctttaggctgctgatctgaagacacgccgtgctgacagacgtgtccatggagaagacaaaccatcctgtgaagccgtgggtatacgttgggttcccagtgtaggtgatgatccatcacatccactcaaagccctgtccaggggtctatcatacccaattcataccatagatggtgaaggtgtaaccagaagacttataggagaccttcactgaggccccaggcttcttcacctcaggcccagactgcaccagctgcagggagtgggcacctgtagagtgtcacgttcacctgagcgggctggcaaggc

SEQ ID NO: 1927 - DNA, 448 bp, Artificial Sequence
  source: /note="Description of Artificial Sequence: Synthetic polynucleotide"
gcctccctcgcgccatcagagagtgtcattacgctcttgcctggcccagtacacctggctccccgctatccccagacagcagactcacctgaggagacggtgaccagggtgccctggccccagtgctggaagtatgtcgacagagtgtcattacgcttcatctctcatacagtcatacacggccgtgtcctcagcctttaggctgctgatcttcagatacgccatgctgacagaggtgtccatggagaatagaaaccgtcctgtgaagccgttggtatatgttgggttcccagtgtaggtgatgatccatcccatccactcaagcccttgtccaggggctggtcacactgaattcataccatactggctgcatagtattccatgatttacatatatcatattttatctaatcaagagtgtcattacgctctgagcgggctggcaaggc

SEQ ID NO: 1928 - DNA, 495 bp, Artificial Sequence
  source: /note="Description of Artificial Sequence: Synthetic polynucleotide"
gcctccctcgcgccatcagagagtgtccattgagtcttgcctggcccagtacacctggctccccgctatccccagacagcagactcacctgaggagacggtgaccagggtgccctggccccagtgctggaagtatgtcgacagagtgtccattgagttcaacacagtaataaatggctgcatcctcagtctttaggcagctagtctgcagatccgccgtgctgacagaggtgtccatggagaagacaaaccgtgtgtgaatctgtgggcatacattgggttcaccagggtaggatgatccatcccatccactcaagcccctgtcctggggtctgtcgtatccaattcataccataggtgatgacagtttaaccagacaccttgcaggagaccttcgccgaggccccaggctgcttcacctcaggcccagactgcaccagctgcactcgggagtgggcaccagagtgtccattgagtctgagcgggctggcaaggc

SEQ ID NO: 1929 - DNA, 495 bp, Artificial Sequence
  source: /note="Description of Artificial Sequence: Synthetic polynucleotide"
gcctccctcgcgccatcaggttccgaacttggttatggcctggtgcctggacagagaagactgggagggggctgcagtgggactcacctgaggagacagtgaccagggtgccacggccccagagatcgaagtaccgtcgacgttccgaacttggttatcaacagtaatacacggccgtgtcgtcagatctcagcctgctcagctccatgtaggctgtgctgatggacgtgtccctggtcatggtgaccctgccctgaaacttctgtgcatagtttgtgccaccactgttagggttgatccatcccatccactcaagcccttgtccaggggcctgtcgcacccagtgcatatagtagccggtgaaggtgtatccagaagccttgcaggagaccttcactgaggccccaggcttcttcacctcagccccagactgcaccagctgcacctgggagtgggctccgttccgaacttggttactgagcgggctggcaaggc

SEQ ID NO: 1930 - DNA, 495 bp, Artificial Sequence
  source: /note="Description of Artificial Sequence: Synthetic polynucleotide"
gcctccctcgcgccatcaggttccgaaacctcttgtggcctggtgcctggacagagaagactgggagggggctgcagtgggactcacctgaggagacagtgaccagggtgccacggccccagagatcgaagtaccgtcgacgttccgaaacctcttgtcaacagtaatacacagccatgtcctcagatctcaggctgctcagctccatgtaggctgtgctcgcggatgtgtccctggtaatggtgactctgccctggaactcctgtgaatattttgtgttaccattgccagcgttgctccatcccatccactcaagcctttgtccgggggcctggcgcacccaatgcatagcatagctagtgaaggtgtatccagaagccttgcaggaaaccttcactgaggccccaggcttcttcacctcagccccagactgcaccagctgaacctgggagtggacaccgttccgaaacctcttgctgagcgggctggcaaggc

SEQ ID NO: 1931 - DNA, 495 bp, Artificial Sequence
  source: /note="Description of Artificial Sequence: Synthetic polynucleotide"
gcctccctcgcgccatcaggttccgaactgattcttggcctggtgcctggacagagaagactgggagggggctgcagtgggactcacctgaggagacagtgaccagggtgccacggccccagagatcgaagtaccgtcgacgttccgaactgattcttcaacagtaatacacggccgtgtcctcagatctcaggctgctcagctccatgtaggctgtgcttatggaggtgttcctggtcatggtgactctgccctggaacttctgtgcatagcctgtgttaccactgttagggttcatccatcccatccactcaagcccttgtccagtggcctgtcgcacccagttgatatcataactggtgaaggtgtatccagaagccttgcaggagaccttcactgaggccccaggcttcttcacctcagccccagactgcaccagctgcacctgggagtgggcaccgttccgaactgattctctgagcgggctggcaaggc

SEQ ID NO: 1932 - DNA, 495 bp, Artificial Sequence
  source: /note="Description of Artificial Sequence: Synthetic polynucleotide"
gcctccctcgcgccatcaggttccgaaagtaccgatggcctggtgcctggacagagaagactgggagggggctgcagtgggactcacctgaggagacagtgaccagggtgccacggccccagagatcgaagtaccgtcgacgttccgaaagtaccgatcaacagtaatacacggccgtgtcgtcagatctcaggctcctcagctccatgtaggctgtgctcgtggatgtgtctgtggtcatggtgactctgccctggagcttctgtgcatagtttgtgttaccattgtaagcgctgatccatcccatccactcaagcccttgtccaggggcctgtcgcacccagctgataccatagctggtaaaggtgtaaccagaagccttgcaggagaccttcactgaggccccaggcttcttcacctcagctccagactgcaccagctgaacctgggagtgggcaccgttccgaaagtaccgactgagcgggctggcaaggc

SEQ ID NO: 1933 - DNA, 495 bp, Artificial Sequence
  source: /note="Description of Artificial Sequence: Synthetic polynucleotide"
gcctccctcgcgccatcaggttccgaaatccatggtggcctggtgcctggacagagaagactgggagggggctgcagtgggactcacctgaggagacagtgaccagggtgccacggccccagagatcgaagtaccgtcgacgttccgaaatccatggtcaacagtaatacacggccgtgtcctcagatctcaggctgctcagctccatgtaggctgtgtctgtagatgtgtcctcggtcatggtgactctgccctggaacttctgtgcgtagattgtttcaccatcttcaggatcaaaacctcccatccactcaagcccttttccaggagcctgtcgcacccagtgcatggataattcagtgagggtgtatccggaaaccttgcaggagaccttcactgaggccccaggcttcttcacctcagccccagactgtaccagctggacctgggcgtgggtgccgttccgaaatccatggctgagcgggctggcaaggc

SEQ ID NO: 1934 - DNA, 495 bp, Artificial Sequence
  source: /note="Description of Artificial Sequence: Synthetic polynucleotide"
gcctccctcgcgccatcaggttccgaagtagcagttggcctggtgcctggacagagaagactgggagggggctgcagtgggactcacctgaggagacagtgaccagggtgccacggccccagagatcgaagtaccgtcgacgttccgaagtagcagttcaacagtaatacatggctgtgtcctcagatctcaggctgctcagctccatgtaggctgtgctcatagacctgtccctggtaatggtgactctgtcctggaatttctgtgcgtagttggtgttaccattgaaaggtgtgatccatcccatccactcaagcgcttgtccgggggcctgtcgcacccagtgcaggtagcggtaggtgaaggtgtatccggaagccttgcaggaaaccttcactgaggacccagtcttcttcacctcagccccagactgcaccagctgcatctgggagtaggcatcgttccgaagtagcagtctgagcgggctggcaaggc

SEQ ID NO: 1935 - DNA, 495 bp, Artificial Sequence
  source: /note="Description of Artificial Sequence: Synthetic polynucleotide"
gcctccctcgcgccatcaggttccgaaatcttcgttggcctggtgcctggacagagaagactgggagggggctgcagtgggactcacctgaggagacagtgaccagggtgccacggccccagagatcgaagtaccgtcgacgttccgaaatcttcgttcaacagtaatacacggccgtgtcctcagatctcaggctgctcagctccatgtagactgtgctcgtggacgtgtccctggtcatggtgactctgccctggaacttctgtgcgtagcttgtgctaccaccactagggttgattattcccatccactcaagcccttgtccaggggcctgtcgcacccagtgcatatagtagctggtgaaggtgtatccagatgccttgcaggaaaccttcactgaggccccaggcttcttcacctcagccccagactgcaccagctgcacctgggagtgagcaccgttccgaaatcttcgtctgagcgggctggcaaggc

SEQ ID NO: 1936 - DNA, 495 bp, Artificial Sequence
  source: /note="Description of Artificial Sequence: Synthetic polynucleotide"
gcctccctcgcgccatcaggttccgaatccacagttggcctggtgcctggacagagaagactgggagggggctgcagtgggactcacctgaggagacagtgaccagggtgccacggccccagagatcgaagtaccgtcgacgttccgaatccacagttcaacagtaatacacggccgtgtcctcggatctcaggctgctcagctccatgtaggctgtgcttgtggacatgtccctggtaatggtgactctttcctggaacttctgtgcgtagtttgtgttaccactgccaacgacgatccatcctatccactcaaggcgttgtccacgagcctgtcgcacccactgcatagcagagctagtaaaggtgaatccagaagccttgcaggagaccttcactgaggtcccaggcttcttcacctcaggcccagactgcaccagctgcatttgggagtgggcaccgttccgaatccacagtctgagcgggctggcaaggc

SEQ ID NO: 1937 - DNA, 495 bp, Artificial Sequence
  source: /note="Description of Artificial Sequence: Synthetic polynucleotide"
gcctccctcgcgccatcaggttccgaaagctagtgtggcctggtgcctggacagagaagactgggagggggctgcagtgggactcacctgaggagacagtgaccagggtgccacggccccagagatcgaagtaccgtcgacgttccgaaagctagtgtcaacagtaatacacggccgtgtcctcagatctcaggctgctcagctccatgtaggctgtgctcgtggatttgtccgcggtaatcgtgactctgccctggaacttctgtgcgtagtttgctgtaccaaagatagggatgatccctcccatccactcaagcccttgtccaggggcctgtcgcacccagctgatagcatagctgctgaaggtgcctccagaagccttgcaggagaccttcaccgaggacccaggcttcttcacctcagccccagactgcaccagctgcacctgggactggacaccgttccgaaagctagtgctgagcgggctggcaaggc

SEQ ID NO: 1938 - DNA, 495 bp, Artificial Sequence
  source: /note="Description of Artificial Sequence: Synthetic polynucleotide"
gcctccctcgcgccatcaggttccgaataaccaagtggcctggtgcctggacagagaagactgggagggggctgcagtgggactcacctgaggagacagtgaccagggtgccacggccccagagatcgaagtaccgtcgacgttccgaataaccaagtcaatagtaatacacagccatgtcctcagatgtcaggctgctcaggtctgtgtaggctgtggttgtggacatgtccctggtcatggtgaatctgccctgaaacttcttggcatagcttgggctaccattgccagggttgatccatcccatccactcaagcccttgtccaggggactgttgcacccaatgtataccgtagctggtgatggtaaacccagaaaaactacaggagactttcactgaggccccagacttcctcacctcagcccaagactgcaccagctggacctgggagtgggcaccgttccgaataaccaagctgagcgggctggcaaggc

SEQ ID NO: 1939 - DNA, 495 bp, Artificial Sequence
  source: /note="Description of Artificial Sequence: Synthetic polynucleotide"
gcctccctcgcgccatcaggttccgaacaagaggttggcctggtgcctggacagagaagactgggagggggctgcagtgggactcacctgaggagacagtgaccagggtgccacggccccagagatcgaagtaccgtcgacgttccgaacaagaggttcaacagtaatacacggccgtgtcctcagatctcaggctgctcagctccatgtaggctgtgtctgtagacgtgtccgcggttatggtgactctgccctggaacttctctgcgtatattgtttcaccatcttcaggatcaacaagtcccatccactcaagcccttttccaggggcctgttgcacccagtgcatgtagtagtcggtgaaggtgtatccagaaaccttgcaggagattttcactgtagccccaggcttcttcacctcagccccagactgtaccagctggacctcggcgtgggtgccgttccgaacaagaggtctgagcgggctggcaaggc

SEQ ID NO: 1940 - DNA, 495 bp, Artificial Sequence
  source: /note="Description of Artificial Sequence: Synthetic polynucleotide"
gcctccctcgcgccatcaggttccgaaagttgacctggcctggtgcctggacagagaagactgggagggggctgcagtgggactcacctgaggagacagtgaccagggtgccacggccccagagatcgaagtaccgtcgacgttccgaaagttgacctcatgcacagtaatatgtggctgtgtccacagggtccatgttggtcattgtaaggaccacctggtttttggaggtgtccttggtgatggtgagcctgctcttcagagatgggctgtagcgcttatcatcattccaataaatgagtgcaagccactccagggcctttcctgggggctgacggatccagcccacacccactccactagtgctgagtgagaacccagagaaggtgcaggtcagcgtgagggtctgtgtgggtttcaccagcgtaggaccagactccttcaaggtgatctgggacaagttccgaaagttgaccctgagcgggctggcaaggc

SEQ ID NO: 1941 - DNA, 495 bp, Artificial Sequence
  source: /note="Description of Artificial Sequence: Synthetic polynucleotide"
gcctccctcgcgccatcaggttccgaacagcatattggcctggtgcctggacagagaagactgggagggggctgcagtgggactcacctgaggagacagtgaccagggtgccacggccccagagatcgaagtaccgtcgacgttccgaacagcatattcatgcacagtaatatgtggctgtgtccacagggtccatgttggtcatggtaaggaccacctggcttttggaggtgtccttggagatggtgagcctgctcttcagagatgtgctgtaggatttttcgtcattcgaaaaaatgtgtgcaagccactccagggccttccctgggggctgacggatccagctcacacccattctagcattgctgagtgagaacccagagacggtgcaggtcagcgtgagggtctctgtgggtttcaccagcacaggaccagactccttcaaggtgacctgggacaagttccgaacagcatatctgagcgggctggcaaggc

SEQ ID NO: 1942 - DNA, 495 bp, Artificial Sequence
  source: /note="Description of Artificial Sequence: Synthetic polynucleotide"
gcctccctcgcgccatcaggttccgaagcaggatttggcctggtgcctggacagagaagactgggagggggctgcagtgggactcacctgaggagacagtgaccagggtgccacggccccagagatcgaagtaccgtcgacgttccgaagcaggatttcatgcacaataatacgtggctgtgtccacagggtccatgttggtcattgtaaggaccacctggtttttggaggtgtccttggagatggtgagcctggtcttcagagatgtgctgtagtatttatcatcatcccaatcaatgagtgcaagccactccagggccttccctgggggctgacggatccagctcacacacattccactagtgctgagtgagaacccagagaaggtgcaggtcagtgtgagggtctgtgtgggtttcaccagcgcaggaccagactccctcaaggtgacctgggataagttccgaagcaggattctgagcgggctggcaaggc

SEQ ID NO: 1943 - DNA, 495 bp, Artificial Sequence
  source: /note="Description of Artificial Sequence: Synthetic polynucleotide"
gcctccctcgcgccatcaggttccgaagtccattctggcctggtgcctggacagagaagactgggagggggctgcagtgggactcacctgaggagacagtgaccagggtgccacggccccagagatcgaagtaccgtcgacgttccgaagtccattctcaacagtaatacacagccgtgtcctcggctctcaggctgttcatttgcagatacagtgagttcttggcgttgtctctggagatggtgaatcggcccttcacagagtccacatagtatttctcacttccatcttgctttatgttggccacccactccagccccttccctggagcctggcggacccagctcatccaatagctactaaaggtgaatccagaggctgcacaggagagtctcagggaccccccaggctggaccaagcctcccccagactccaccagctgcacctcacactggacaccgttccgaagtccattcctgagcgggctggcaaggc

SEQ ID NO: 1944 - DNA, 495 bp, Artificial Sequence
  source: /note="Description of Artificial Sequence: Synthetic polynucleotide"
gcctccctcgcgccatcaggttccgaagcataacttggcctggtgcctggacagagaagactgggagggggctgcagtgggactcacctgaggagacagtgaccagggtgccacggccccagagatcgaagtaccgtcgacgttccgaagcataacttcatgcacagtaatacaaggccgtgtcctcagctctcagactgttcatttgcagatacagggagttcttggcgttgtctctggagatggtgaatcggcccttcacagagtccgcatagcctatgctaccactattccaactaatacctgagacccactccaggcccttccctggagcttgccggacccagtgcatggcataatcatcaaaggtgaatccagaggctgcacaggagagtctcagggacctgccaggctgtaccaagcctcccccagactccaccagctgcacttcacactggacgttccgaagcataactctgagcgggctggcaaggc

SEQ ID NO: 1945 - DNA, 495 bp, Artificial Sequence
  source: /note="Description of Artificial Sequence: Synthetic polynucleotide"
gcctccctcgcgccatcaggttccgaaatatgctgtggcctggtgcctggacagagaagactgggagggggctgcagtgggactcacctgaggagacagtgaccagggtgccacggccccagagatcgaagtaccgtcgacgttccgaaatatgctgtcaacagtaatacacggccgtgtcctcggctctcaggctgttcatttgcagatacagtgagttcttggcgttgtccctggagatggtgaatcggcccttcacagagtctgcgtagtatatggtactaccactactactaatgtatgaaacccactccagccccttccctggagcctggcggatccagctcatgtagtagtcactgaaggtgaatccagaggctgcacaggagagtctcagggaccctccaggcttgaccaagcctcccccagactccaccagctgcacctgacactggacaccgttccgaaatatgctgctgagcgggctggcaaggc

SEQ ID NO: 1946 - DNA, 495 bp, Artificial Sequence
  source: /note="Description of Artificial Sequence: Synthetic polynucleotide"
gcctccctcgcgccatcaggttccgaaaatcctgctggcctggtgcctggacagagaagactgggagggggctgcagtgggactcacctgaggagacagtgaccagggtgccacggccccagagatcgaagtaccgtcgacgttccgaaaatcctgctcaacagtaatacacagccgtgtccccggctctcaggctgttcatttgaagatacaaggagttcttggcattttctctggagatggtgaatcggcccttcacggagcctggatagtatgtgtcaccagcagtaccaatagctgagacccactccagaccttttcctgtagcttggcggacccagtgcatgtcgtagctactgaaggtgaatccagaggctgcacaggagagtctcagggaccccccaggctgtaccaagcctcccccagactccaccagctgcacctcacactggacacctgcgttccgaaaatcctgcctgagcgggctggcaaggc

SEQ ID NO: 1947 - DNA, 495 bp, Artificial Sequence
  source: /note="Description of Artificial Sequence: Synthetic polynucleotide"
gcctccctcgcgccatcaggttccgaatgagaccttggcctggtgcctggacagagaagactgggagggggctgcagtgggactcacctgaggagacagtgaccagggtgccacggccccagagatcgaagtaccgtcgacgttccgaatgagaccttcaacagtaatacacggctgtgtcctcggttttcaggctgttcatttgcagatacagcgtgttttttgaatcatctcttgagatggtgaatctgcctttcacgggtgcagcgtagtctgttgtcccaccatcagttttgcttttaatacggccaacccactccagccccttccctggagcctggcggacccagctcatccaggcgttactgaaagtgaatccagaggctgcacaggagagtctaagggaccccccaggctttaccaagcctcccccagactccaccagctgcacctcacactggttccgaatgagacctctgagcgggctggcaaggc

SEQ ID NO: 1948 - DNA, 495 bp, Artificial Sequence
  source: /note="Description of Artificial Sequence: Synthetic polynucleotide"
gcctccctcgcgccatcaggttccgaagaatggactggcctggtgcctggacagagaagactgggagggggctgcagtgggactcacctgaggagacagtgaccagggtgccacggccccagagatcgaagtaccgtcgacgttccgaagaatggactcaacagtaatacacagccatgtcctcggctctccgtctgttcttttgcagatacagggagttcctggaattgtctctggagatgatgaatcggcgcttcacggagtccacatagtgcgtcctactgccattccaactaacacccgatacccactccagcccctttcctggagccttgcgggcccagttcatgtcactgttactgaaggtgaatccagaggctgcacaggagagtctcagggaccccccaggctgtaccaagcctcccccagactccaccagctgcacctcacactggacaccgttccgaagaatggacctgagcgggctggcaaggc

SEQ ID NO: 1949 - DNA, 495 bp, Artificial Sequence
  source: /note="Description of Artificial Sequence: Synthetic polynucleotide"
gcctccctcgcgccatcaggttccgaacacatggatggcctggtgcctggacagagaagactgggagggggctgcagtgggactcacctgaggagacagtgaccagggtgccacggccccagagatcgaagtaccgtcgacgttccgaacacatggatcaacagtgatacaaggccgtgtcctcggctctcagactgttcatttgcagatacagggagttcttggcgttgtctctggagatggtgaatcggcccttcacagagtctgcataacctgtgctaccaccattccaattaataccagagacccactccagccccttccctggagcttggcggacccagctcatgccataatcatcaaaggtgaatccagaggctgcacaggagagtctcagggaccccccaggccgtaccacacctcccccagactccaccagctgcacctcacactggacaccgttccgaacacatggactgagcgggctggcaaggc

SEQ ID NO: 1950 - DNA, 495 bp, Artificial Sequence
  source: /note="Description of Artificial Sequence: Synthetic polynucleotide"
gcctccctcgcgccatcaggttccgaattgaccattggcctggtgcctggacagagaagactgggagggggctgcagtgggactcacctgaggagacagtgaccagggtgccacggccccagagatcgaagtaccgtcgacgttccgaattgaccattcaacagtaatacacagccgtgtcctcggctctcaggctgttcatttgcagatacagtgagttcttggcgttgtctctggagatggtgaatcggcccttcactgagtctgcgtagtatatgtaactactactactactaatggatgagacccactccagccccttccctggagcctggcggacccagttcatgctatagctactgaaggtgaatccagaggctgcacaggagagtctcagggaccccccaggcttgaccaggcctcccccagactccaccagctgcacctcacactggacaccgttccgaattgaccatctgagcgggctggcaaggc

SEQ ID NO: 1951 - DNA, 495 bp, Artificial Sequence
  source: /note="Description of Artificial Sequence: Synthetic polynucleotide"
gcctccctcgcgccatcaggttccgaaaagccatctggcctggtgcctggacagagaagactgggagggggctgcagtgggactcacctgaggagacagtgaccagggtgccacggccccagagatcgaagtaccgtcgacgttccgaaaagccatctcaacagtaatatacggccgtgtcctcggctctcaggctgttcatttgcagatacagcgtgttcttggaattgtctctggagatggtgaaccggcccttcacggagtctgcgtagtatgtgctaccaccactaccactaatagctgagacccactccagccccttccctggagcctggcggacccagctcatggcatagctgctaaaggtgaatccagaggctgcacaggagagtctcagggaccccccaggctgtaccaagcctcccccagactccaacagctgcacctcacactggacaccgttccgaaaagccatcctgagcgggctggcaaggc

SEQ ID NO: 1952 - DNA, 495 bp, Artificial Sequence
  source: /note="Description of Artificial Sequence: Synthetic polynucleotide"
gcctccctcgcgccatcaggttccgaatccatgtgtggcctggtgcctggacagagaagactgggagggggctgcagtgggactcacctgaggagacagtgaccagggtgccacggccccagagatcgaagtaccgtcgacgttccgaatccatgtgtcaacagtaatacacagccgtgtcctcagctctcaggctgttcatttgcagatacagcgtgttcttggaattgtctctggagatggtgaatcggcccttcacggagtctgcatagtatttattacttccatcatatgatataactgccacccactccagccccttgcctggagcctggcggacccagtgcatgccatagctactgaaggtgaatccagaggctgcacaggagagtctcagggacctcccaggctggaccacgcctcccccagactccaccagctgcacctgacactggacaccgttccgaatccatgtgctgagcgggctggcaaggc

SEQ ID NO: 1953 - DNA, 495 bp, Artificial Sequence
  source: /note="Description of Artificial Sequence: Synthetic polynucleotide"
gcctccctcgcgccatcaggttccgaacaagtcactggcctggtgcctggacagagaagactgggagggggctgcagtgggactcacctgaggagacagtgaccagggtgccacggccccagagatcgaagtaccgtcgacgttccgaacaagtcactcaacagtaatacacagccgtgtcctcagctctcaggctgttcatttgcagatacagcgtgttcttggaattgtctctggagatggtgaatcggcccttcacggagtctgcatagtatttattacttccatcatatgatataactgccacccactccagccccttgcctggagcctggcggacccagtgcatgccatagctactgaaggtgaatccagaggctgcacaggagagtctcagggacctcccaggctggaccacgcctcccccagactccaccagctgcacctgacactggacaccgttccgaacaagtcacctgagcgggctggcaaggc

SEQ ID NO: 1954 - DNA, 495 bp, Artificial Sequence
  source: /note="Description of Artificial Sequence: Synthetic polynucleotide"
gcctccctcgcgccatcaggttccgaactgcaatctggcctggtgcctggacagagaagactgggagggggctgcagtgggactcacctgaggagacagtgaccagggtgccacggccccagagatcgaagtaccgtcgacgttccgaactgcaatctcaacagtaatacacagccgtgtcctcggctctcaggctgttcatttgcagatacagcgtgttcttggaattgtctctggagatggtgaatcggcccttcacggagtctgcatagtatttattacttccatcataccatataactgccacccactccagccccttgcctggagcctggcggacccagtgcatgccatagctactgaaggtgaatccagacgctgcacaggagagtctcagggacctcccaggctggaccacgcctcccccagactccaccagctgcacctgacactggacaccgttccgaactgcaatcctgagcgggctggcaaggc

SEQ ID NO: 1955 - DNA, 495 bp, Artificial Sequence
  source: /note="Description of Artificial Sequence: Synthetic polynucleotide"
gcctccctcgcgccatcaggttccgaaatcgacgatggcctggtgcctggacagagaagactgggagggggctgcagtgggactcacctgaggagacagtgaccagggtgccacggccccagagatcgaagtaccgtcgacgttccgaaatcgacgatcaacagtaatacacagccgtgtcctcggccctcaggctattcgtttgcagatacagggtgttcctggaattgtctctggagatgatgaatcggcccttcacagagtctgcatagtgcgtcctactgccattccaactaacacccgatacccactccagcccctttcctggagcctgatggacccagttcatgtcactgttactgaaggtgaatccagaggctgcacaggagagtctcagggatcccccaggctgtaccaagcctcccccagactccaccagctgcacctcacactggacaccgttccgaaatcgacgactgagcgggctggcaaggc

SEQ ID NO: 1956 - DNA, 495 bp, Artificial Sequence
  source: /note="Description of Artificial Sequence: Synthetic polynucleotide"
gcctccctcgcgccatcaggttccgaaacagactgtggcctggtgcctggacagagaagactgggagggggctgcagtgggactcacctgaggagacagtgaccagggtgccacggccccagagatcgaagtaccgtcgacgttccgaaacagactgtcaacagtaatacacggccgtgccctcagctctcaggttgttcatttgaagatacagcgtgttcttggaattgtctctggagatggtgaatctgcccttcctggagtctgcgtagtatgtgctaccaccactaatggatgagacccactccagccccttccctggagcctggcggatccagctcatctcattgctactgacggtgaatccagaggctgcacaggagagtctcagggaccccctaggctgtaccaagcctcccccagactccaccagctgcacctcacactggacacctgcaaagttccgaaacagactgctgagcgggctggcaaggc

SEQ ID NO: 1957 - DNA, 495 bp, Artificial Sequence
  source: /note="Description of Artificial Sequence: Synthetic polynucleotide"
gcctccctcgcgccatcaggttccgaaccttatagtggcctggtgcctggacagagaagactgggagggggctgcagtgggactcacctgaggagacagtgaccagggtgccacggccccagagatcgaagtaccgtcgacgttccgaaccttatagtcatgcacagtaatacaaggcggtgtcctcagttctcagactgttcatttgcagatacagggagtttttgctgttgtctctggagatggtgaatcggcccttcacagagtctgcatagtatgtgctaccaccatcccaactaataagagagacccactccagacccttccccggagcttgacggacccagtgcatggtataatcatcaaaggtgaatccagaggctgcacaggagagtctcagggaccccccaggctgtaccacgactcccccagactccaccagctgcacttcacactggacgttccgaaccttatagctgagcgggctggcaaggc

SEQ ID NO: 1958 - DNA, 495 bp, Artificial Sequence
  source: /note="Description of Artificial Sequence: Synthetic polynucleotide"
gcctccctcgcgccatcaggttccgaatacgcgtttggcctggtgcctggacagagaagactgggagggggctgcagtgggactcacctgaggagacagtgaccagggtgccacggccccagagatcgaagtaccgtcgacgttccgaatacgcgtttcaacagtaatacacagccgtgtcctcgtctctcaggctgttcatttgcagatacagtgagttcttggcattgtctctggagatggtgaatcggcccttcacagagtctgcgtagtatatggtactactactactactaatgtatgaaacccactccagccccttccctggagcctggcggacccagttcatgctatagctactgaaggtgaatccagaggctgcacaggagagtctcagggaccccccaggctgtaccaagcctcccccagactccaccagctgcacctcacactggacaccgttccgaatacgcgttctgagcgggctggcaaggc

SEQ ID NO: 1959 - DNA, 495 bp, Artificial Sequence
  source: /note="Description of Artificial Sequence: Synthetic polynucleotide"
gcctccctcgcgccatcaggttccgaactataaggtggcctggtgcctggacagagaagactgggagggggctgcagtgggactcacctgaggagacagtgaccagggtgccacggccccagagatcgaagtaccgtcgacgttccgaactataaggtcaacagtaatacacggctgtgtcctcggttttcaggctgttcatttgcagataggcgatgcttttggaatcatctcttgagatggtgaatctgcctttcacagacgcggcgtattctgttgtcccaccataagctttgcttctaatgaaacctacccactccagccccttccctggagcctggcggaaccagctcatagcataatcaccaaaggtgaatccagaagctgtacaggagagtctcagggaccgccctggctgtaccaagcctcccccagactccaccagctgcacctcacattggttccgaactataaggctgagcgggctggcaaggc

SEQ ID NO: 1960 - DNA, 495 bp, Artificial Sequence
  source: /note="Description of Artificial Sequence: Synthetic polynucleotide"
gcctccctcgcgccatcaggttccgaatcttagtctggcctggtgcctggacagagaagactgggagggggctgcagtgggactcacctgaggagacagtgaccagggtgccacggccccagagatcgaagtaccgtcgacgttccgaatcttagtctcaacagtaatacacggccgtgtcctcggctctcaggctgttcatttgaagatacagcgtgttcttggaattgtctctggagatggtgaatcggcccttcacggagtctgcgtagtatgtgctaccaccgctataaataactgagacccactccagccccttccctggagcctggcggacccagctcatgtagttgctactgacggtgaacccagaggctgcacaggagagtctcagggaccccccaggctggatcaagcctcctccagactccaccagctgcacctcacactggacacctgcgttccgaatcttagtcctgagcgggctggcaaggc

SEQ ID NO: 1961 - DNA, 495 bp, Artificial Sequence
  source: /note="Description of Artificial Sequence: Synthetic polynucleotide"
gcctccctcgcgccatcaggttccgaatgtctgcatggcctggtgcctggacagagaagactgggagggggctgcagtgggactcacctgaggagacagtgaccagggtgccacggccccagagatcgaagtaccgtcgacgttccgaatgtctgcatcaacagtaatacacagccatgtcctcagctctcaggctgcccatttgaagatacagcgtgttcttggaattgtctctggagatggtgaatctgcccttcacagagtctgcataatatgtgctacccccattactactaatagctgaaacatattccagtcccttccctggagcctggcggacccagtgcatagcatagctactgaaggtgaatccagaggctgcacaggagagtctcagggaccccccaggctggaccaagccttccccagactccaccagctgcacctcacactggacaccgttccgaatgtctgcactgagcgggctggcaaggc

SEQ ID NO: 1962 - DNA, 495 bp, Artificial Sequence
  source: /note="Description of Artificial Sequence: Synthetic polynucleotide"
gcctccctcgcgccatcaggttccgaagccattaatggcctggtgcctggacagagaagactgggagggggctgcagtgggactcacctgaggagacagtgaccagggtgccacggccccagagatcgaagtaccgtcgacgttccgaagccattaatcaacagtaatacacagccgtgtcctcagctctcaggctgttcatttgaagatacagcgtgttcttggaattgtctctggagatggtgaatcggcccttcacggagtctgcgtagtatgtgctaccacagctataaataactgagacccactccagccccttccctggagcctggcggacccagctcatgtagttgctactgacggtgaacccagaggctgcacaggagagtctcagggaccccccaggctggatcaagcctcctccagactccaccagctgcacctcacactggacacctgcgttccgaagccattaactgagcgggctggcaaggc

SEQ ID NO: 1963 - DNA, 495 bp, Artificial Sequence
  source: /note="Description of Artificial Sequence: Synthetic polynucleotide"
gcctccctcgcgccatcaggttccgaagactaagatggcctggtgcctggacagagaagactgggagggggctgcagtgggactcacctgaggagacagtgaccagggtgccacggccccagagatcgaagtaccgtcgacgttccgaagactaagatcaacagtaatacacggccgtgtcctcggttttcaggctgttcatttgcagatacagtgagttctttgaatcatctcttgagatggtgaatctgcctttcacagacgcggcgtattctgtggtgtaactgttagctttgtttctagtacggccaacccactccagccccttccctggagcctggcggacccagtccatgtagtggtcactgaaggtgaatccagaggctgcacaggagagtctcagggaccctccaggctggaccaagcctcccccagactccaccagctgcacctcacactggttccgaagactaagactgagcgggctggcaaggc

SEQ ID NO: 1964 - DNA, 495 bp, Artificial Sequence
  source: /note="Description of Artificial Sequence: Synthetic polynucleotide"
gcctccctcgcgccatcaggttccgaaaggttgcttggcctggtgcctggacagagaagactgggagggggctgcagtgggactcacctgaggagacagtgaccagggtgccacggccccagagatcgaagtaccgtcgacgttccgaaaggttgcttcaacagtaatacacggccgtgtcctcggttttcaggctgttcatttgcagatacgccgtgttctttgaatcatctctggagatggtgaacctgcctttcaccgacgcagcatatgctgtcgcgtaactgttagctttgcttctaatacggccaacccactccagccctttcccggaagcctggcggacccagtgcatagcagagccactgaaggtgaacccagaggctgcacaggagagtttcagggaccccccaggctggaccaagcctcccccggactccaccagctgcacctcacactggttccgaaaggttgctctgagcgggctggcaaggc

SEQ ID NO: 1965 - DNA, 495 bp, Artificial Sequence
  source: /note="Description of Artificial Sequence: Synthetic polynucleotide"
gcctccctcgcgccatcaggttccgaactcgagaatggcctggtgcctggacagagaagactgggagggggctgcagtgggactcacctgaggagacagtgaccagggtgccacggccccagagatcgaagtaccgtcgacgttccgaactcgagaatcaacagtaatacacagccgtgtcctcggctctcagactgttcatttgcagatacagcgtgttcttggcgttgtctctggagatggtgaatcggcccttcacggagtccgcgtagcttgtgctactcccatcactattaatacgtgagacccacaccagccccttccctggagcttggcggacccagtgcatccagtagctactgaaggtgaatccagaggctgcacaggagagtctcagggaccccccaggctgaactaagcctcccccggactccaccagctgcacctcacactggacaccgttccgaactcgagaactgagcgggctggcaaggc

SEQ ID NO: 1966 - DNA, 495 bp, Artificial Sequence
  source: /note="Description of Artificial Sequence: Synthetic polynucleotide"
gcctccctcgcgccatcaggttccgaattaatggctggcctggtgcctggacagagaagactgggagggggctgcagtgggactcacctgaggagacagtgaccagggtgccacggccccagagatcgaagtaccgtcgacgttccgaattaatggctcaacagtaatacacagccgtgtcctcagctctcaggctgttcatttgcagatacagcgtgttcttggaattgtctctggagatggtgaatcggcccttcacggagtctgcatagtatttattacttccatcataccgtataaatgccacccactccagccccttgcctggagcctggcggacccagtgcatgccatagctactgaaggtgaatccagacgctgcacaggagagtctcagggaccccccaggctggaccacgcctcccccagactccaccagctgcacctgacactggacaccgttccgaattaatggcctgagcgggctggcaaggc

SEQ ID NO: 1967 - DNA, 495 bp, Artificial Sequence
  source: /note="Description of Artificial Sequence: Synthetic polynucleotide"
gcctccctcgcgccatcaggttccgaatgcagacatggcctggtgcctggacagagaagactgggagggggctgcagtgggactcacctgaggagacagtgaccagggtgccacggccccagagatcgaagtaccgtcgacgttccgaatgcagacatcaacagtaatacacagccgtgtcctcagctctcaggctgttcatttgaagatgcagcgtgttcttggaattgtctctggagatggtgaatctgcccttcctggagtctgcgtagtatgtgctaccaccactaatggatgagacccactccagacccttccctggagcctggcggacccagctcatctcattgctactgacggtgaatccagaggctgcacaggagagtctcagggaccccccaggctgtaccaagactccccgagactccaccagctgcacctcacactggacacctgcaaagttccgaatgcagacactgagcgggctggcaaggc

SEQ ID NO: 1968 - DNA, 495 bp, Artificial Sequence
  source: /note="Description of Artificial Sequence: Synthetic polynucleotide"
gcctccctcgcgccatcaggttccgaatcactgagtggcctggtgcctggacagagaagactgggagggggctgcagtgggactcacctgaggagacagtgaccagggtgccacggccccagagatcgaagtaccgtcgacgttccgaatcactgagtcaacagtaatacacggccgtgtccgcggcggtcacagagctcagcttcagggagaactggttcttggacgtgtctactgacatggtgactcgactcttgagggaggggttgtagttggtgctcccactggtatagatacgcccaatccactccagtcccttcccggcgggctgccggatccagctccagtagtaactactgatggagccaccagagacagtgcaggtgagggacagggtctccgaaggcttcaccagtcctgggcccgactcctgcagctgcacctgggacaggacccctgtgttccgaatcactgagctgagcgggctggcaaggc

SEQ ID NO: 1969 - DNA, 495 bp, Artificial Sequence
  source: /note="Description of Artificial Sequence: Synthetic polynucleotide"
gcctccctcgcgccatcaggttccgaagagtacgttggcctggtgcctggacagagaagactgggagggggctgcagtgggactcacctgaggagacagtgaccagggtgccacggccccagagatcgaagtaccgtcgacgttccgaagagtacgttcaacagtaatacacggccgtgtccacggcggtcacagagctcagcttcagggagaactggttcttggacgtgtctactgacatggtgactcgactcttgagggacgggttgtagtaggtgctcccactataatagatgtacccaatccactccagtcccttccctgggggctgccggatccagccccaccagttactactgctgatggagtaaccagagacagcgcaggtgagggacagggtgtccgaaggcttcaccagtcctgggcccgactcctgcagctgcacctgggacaggaccacgttccgaagagtacgtctgagcgggctggcaaggc

SEQ ID NO: 1970 - DNA, 495 bp, Artificial Sequence
  source: /note="Description of Artificial Sequence: Synthetic polynucleotide"
gcctccctcgcgccatcaggttccgaaatacgccatggcctggtgcctggacagagaagactgggagggggctgcagtgggactcacctgaggagacagtgaccagggtgccacggccccagagatcgaagtaccgtcgacgttccgaaatacgccatcaacagtaatacacggccgtgtccgcggcggtcacagagctcagcttcagggagaactggttcttggacctgtctactgatatggtgactcgactcttgagggacgggttgtagtaggtgctcccactatgatagatgtacccaatccactccaggcccttccctggtggctgccggatccagctccaggagtaaccaccactgctgatggagccaccagagacagcgcaggtgagggacagggtctgtgaaggcttcaccagtcctgagccggactcctgcagctgcagctgggacaggacgttccgaaatacgccactgagcgggctggcaaggc

SEQ ID NO: 1971 - DNA, 495 bp, Artificial Sequence
  source: /note="Description of Artificial Sequence: Synthetic polynucleotide"
gcctccctcgcgccatcaggttccgaatcgcatcatggcctggtgcctggacagagaagactgggagggggctgcagtgggactcacctgaggagacagtgaccagggtgccacggccccagagatcgaagtaccgtcgacgttccgaatcgcatcatcaacagtaatacacggccgtgtctgcggcagtcacagagctcagcttcagggagaactggttcttggacgtgtctactgatatggtaactcgactcttgagggacgggttgtagtaggtgctcccactgtaatagatgtacccaatccactccaggcccttccctgggggctggcggatccaactccagtagtaatcaccactgctgatggagccaccagagacagtgcaggtgagggacagggtctgtgaaggcttcaccagtcctgggcccgactcctgcagctgcacctgggacaggacgttccgaatcgcatcactgagcgggctggcaaggc

SEQ ID NO: 1972 - DNA, 495 bp, Artificial Sequence
  source: /note="Description of Artificial Sequence: Synthetic polynucleotide"
gcctccctcgcgccatcaggttccgaacgcttaattggcctggtgcctggacagagaagactgggagggggctgcagtgggactcacctgaggagacagtgaccagggtgccacggccccagagatcgaagtaccgtcgacgttccgaacgcttaattcaacagtaatacacggccgtgtccgcggcagtcacagagctcagcttcagggagaactggttcttagacgtgtctactgatatggtaactcgactcttgagggacgggttgtagtaggtgctcccactgtaatagatgtacccaatccactccaggcccttccctgggtgctggcggatccagctccagtagtaaccaccactgctgatggagccaccagagacagtacaggtgagggacagggtctgtgaaggcttcaccagtcctgggcccgactcctgcagctgcacctggggcaggacgttccgaacgcttaatctgagcgggctggcaaggc

SEQ ID NO: 1973 - DNA, 495 bp, Artificial Sequence
  source: /note="Description of Artificial Sequence: Synthetic polynucleotide"
gcctccctcgcgccatcaggttccgaatggttatctggcctggtgcctggacagagaagactgggagggggctgcagtgggactcacctgaggagacagtgaccagggtgccacggccccagagatcgaagtaccgtcgacgttccgaatggttatctcaacagtaatacacagccgtgtccgcggcggtcacagagctcagcttcagggagaactggttcttggacgtgtctactgatatggtgactcgactcttgagggacgggttgtagttggtgcttccactatgattgatttccccaatccactccagccccttccctgggggctggcggatccagctccagtagtaaccactgaaggacccaccatagacagcgcaggtgagggacagggtctccgaaggcttcaacagtcctgcgccccactgctgtagctgcacctgggacaggacccctgtgttccgaatggttatcctgagcgggctggcaaggc

SEQ ID NO: 1974 - DNA, 495 bp, Artificial Sequence
  source: /note="Description of Artificial Sequence: Synthetic polynucleotide"
gcctccctcgcgccatcaggttccgaaggattgcttggcctggtgcctggacagagaagactgggagggggctgcagtgggactcacctgaggagacagtgaccagggtgccacggccccagagatcgaagtaccgtcgacgttccgaaggattgcttcaacagtaatacacagccgtgtctgcggcggtcacagagctcagcttcagggagaactggttcttggacgtgtctacggatatggtgactcgactcttgagggacgggttgtagtaggtgctcccactataatagatactcccaatccactccagccccttccctgggggctggcggatccagccccagtagtaactactactgctgatggagccaccagagacagtgcaggtgagggacagggtctccgaaggcttcaccagtcctgggcccgactcctgcagctgcagctgggacaggacgttccgaaggattgctctgagcgggctggcaaggc

SEQ ID NO: 1975 - DNA, 495 bp, Artificial Sequence
  source: /note="Description of Artificial Sequence: Synthetic polynucleotide"
gcctccctcgcgccatcaggttccgaactcagtgatggcctggtgcctggacagagaagactgggagggggctgcagtgggactcacctgaggagacagtgaccagggtgccacggccccagagatcgaagtaccgtcgacgttccgaactcagtgatcaacagtaatacacggccgtgtccgcagcggtcacagagctcagcttcagggagaactggttcttggacgtgtctactgatatggtgactcgactcttgagggaggggttgtagttggtgctcccactgtaatagatatacccaatccactccagtcccttccctgggggctgccggatccagctccagtagtaactactgatggagccaccagagacagtgcaggtgagggacagggtctccgaaggcttcaccagtcctgggcccgactcctgcagctgcacctgggacaggacccctgtgttccgaactcagtgactgagcgggctggcaaggc

SEQ ID NO: 1976 - DNA, 495 bp, Artificial Sequence
  source: /note="Description of Artificial Sequence: Synthetic polynucleotide"
gcctccctcgcgccatcaggttccgaaacgtactctggcctggtgcctggacagagaagactgggagggggctgcagtgggactcacctgaggagacagtgaccagggtgccacggccccagagatcgaagtaccgtcgacgttccgaaacgtactctcaacagtaatacacggccgtgtccgcagcggtcacagagctcagcttcagggagaactggttcttggacgtgtctactgatatggtgactcgactcttgagggaggggttgtagttggtgctcccactgtaatagatatacccaatccactccagtcccttccctgggggctgccggatccagctccagtagtaaccaccactgctgacggagccaccagagacagtgcaggtgagggacagggtctccgaaggcttcaccagtcctgggcccgactcctgcagctgcacctgggacaggacgttccgaaacgtactcctgagcgggctggcaaggc

SEQ ID NO: 1977 - DNA, 495 bp, Artificial Sequence
  source: /note="Description of Artificial Sequence: Synthetic polynucleotide"
gcctccctcgcgccatcaggttccgaatgatgcgatggcctggtgcctggacagagaagactgggagggggctgcagtgggactcacctgaggagacagtgaccagggtgccacggccccagagatcgaagtaccgtcgacgttccgaatgatgcgatcaacagtaatacacggccgtgtctgcggcggtcacagagctcagcttcagggagaactggttcttggacgtgtctactgatatggtgactcgactcttgagggacgggttgtagtaggtgctcccactatgatagatactcccaatccactccagccccttccctgggggctgccggatccagccccagtagtaaccactgctgatggagtaaccagagacagcgcaggtgagggacagggtctccgaaggcttcaccagtcctgggcccgactcctgcagctgcacctgggacaggaccccgttccgaatgatgcgactgagcgggctggcaaggc

SEQ ID NO: 1978 - DNA, 495 bp, Artificial Sequence
  source: /note="Description of Artificial Sequence: Synthetic polynucleotide"
gcctccctcgcgccatcaggttccgaaattaagcgtggcctggtgcctggacagagaagactgggagggggctgcagtgggactcacctgaggagacagtgaccagggtgccacggccccagagatcgaagtaccgtcgacgttccgaaattaagcgtcaacagtaatacatggcggtgtccgaggccttcaggctgctccactgcaggtaggcggtgctgatggacttgtcggctgagatggtgacctggccttggaaggacgggctgtatctggtatcagagtcaccaggatagatgatccccatccactccaggcctttcccgggcatctggcgcacccagccgatccagtagctggtaaagctgtatccagaacccttacaggagatcttcagagactccccgggctttttcacctctgctccagactgcaccagctgcacctcggcacagactccgttccgaaattaagcgctgagcgggctggcaaggc

SEQ ID NO: 1979 - DNA, 495 bp, Artificial Sequence
  source: /note="Description of Artificial Sequence: Synthetic polynucleotide"
gcctccctcgcgccatcaggttccgaaagcaatcctggcctggtgcctggacagagaagactgggagggggctgcagtgggactcacctgaggagacagtgaccagggtgccacggccccagagatcgaagtaccgtcgacgttccgaaagcaatcctcaacagtaatacatggcggtgtccgaggccttcaggctgctccactgcaggtaggcagtgctgatggacttgtcagctgagatggtgacgtggccttggaaggacgggctgtagttggtataagagtcactaggatcaatcctccccatccactccaagcctttcccgggcatctggcgcacccagctgatccagtagctggtaaagctgtatccagaacccttacaggagatcctcagagactccccgggctttttcacctctgctccagactgcaccagctgcacttcggcacagactccgttccgaaagcaatccctgagcgggctggcaaggc

SEQ ID NO: 1980 - DNA, 495 bp, Artificial Sequence
  source: /note="Description of Artificial Sequence: Synthetic polynucleotide"
gcctccctcgcgccatcaggttccgaagcttagtatggcctggtgcctggacagagaagactgggagggggctgcagtgggactcacctgaggagacagtgaccagggtgccacggccccagagatcgaagtaccgtcgacgttccgaagcttagtatcaacagtaatacacagccgtgtcctcgggagtcacagagttcagctgcagggagaactggttcttggatgtgtctgggttgatggttattcgacttttcacagatactgcataatcattataccacttggacctgtagtatgtccttcccagccactcaaggcctctcgatggggactgcctgatccagttccaagcagcactgttgctagagacactgtccccggagatggcacaggtgagtgagagggtctgcgagggcttcaccagtcctggacctgactgctgcagctgtacctgtgagttccgaagcttagtactgagcgggctggcaaggc

SEQ ID NO: 1981 - DNA, 495 bp, Artificial Sequence
  source: /note="Description of Artificial Sequence: Synthetic polynucleotide"
gcctccctcgcgccatcaggttccgaatgaccttgtggcctggtgcctggacagagaagactgggagggggctgcagtgggactcacctgaggagacagtgaccagggtgccacggccccagagatcgaagtaccgtcgacgttccgaatgaccttgtcaacagtaatacacggcagtgtcctcagcctttaggctgcagatctgcagatatgccgtgctgacagaggtgtccaaggagaagacaaaccgtcctgtgaagccctgggcatacgttgggttcccagtgttggtgttgatccatcccatccactcaagcccttgtccaggggcctgtcgcacccaattcatagcatagctagtgaaggtgtatccagaagccttgcaggaaaccttcactgaggccccaggcttcttcaactcagacccagattgcaccagctgcacctgggagtgggcaccgttccgaatgaccttgctgagcgggctggcaaggc

SEQ ID NO: 1982 - DNA, 495 bp, Artificial Sequence
  source: /note="Description of Artificial Sequence: Synthetic polynucleotide"
gcctccctcgcgccatcaggttccgaacaaggtcatggcctggtgcctggacagagaagactgggagggggctgcagtgggactcacctgaggagacagtgaccagggtgccacggccccagagatcgaagtaccgtcgacgttccgaacaaggtcatcaacagtaatacatggccatgtcctcagcctttaggctgctgatctgcaggtatgctgtgctggcagaggtgtccatggagaagacaaaccgtcctgtgaagccctgggcatatgttgggttcccagtgtaggtgttgaaccatcccatccactcaagcccttgtccaggggcctgtggcacccaattcataccataggtggtgaaactgtaaccagaagccttgcaggagaccttcactgaggccccaggctgcttcacctcatggccagactgcaccagctgcacctgggagtaggtaccgttccgaacaaggtcactgagcgggctggcaaggc

SEQ ID NO: 1983 - DNA, 495 bp, Artificial Sequence
  source: /note="Description of Artificial Sequence: Synthetic polynucleotide"
gcctccctcgcgccatcaggttccgaacactgtactggcctggtgcctggacagagaagactgggagggggctgcagtgggactcacctgaggagacagtgaccagggtgccacggccccagagatcgaagtaccgtcgacgttccgaacactgtactcagggaatgtgcggccctgcccttggccatcacggagctcagctgcagggataactgggccttggatgtgtctctacagatggagagttggcccagaaaggctgggctgaagtgtgtgctgcccctggagctgaggtgccccagcgccttcccagagggctgctgggtccaggcccagaggtctgtgaggacctcaccagccctgggcatgactccagtagctgcatctgatgcaggacactcagggacaagaagcaaagagatgagtcacaagcggacaccacagcccacagcccccgttcgttccgaacactgtacctgagcgggctggcaaggc

SEQ ID NO: 1984 - DNA, 495 bp, Artificial Sequence
  source: /note="Description of Artificial Sequence: Synthetic polynucleotide"
gcctccctcgcgccatcaggttccgaagatgatcctggcctggtgcctggacagagaagactgggagggggctgcagtgggactcacctgaggagacagtgaccagggtgccacggccccagagatcgaagtaccgtcgacgttccgaagatgatcctcagtataaaaatccatggtggtttactcattgtgcgggtagctcagctgtaggaaaaactgttttctgaatgtggatctggaggtggtgactggactcttgagaagcgggttgcactgtgtgtttcctcgtgacctacacacctgacccacttcagcttcttccctgggggctggcagatacagctccaggaggaagtactggttatgattggaaatccagagacagcacaggtgaaggagagggtctctgagggctttactagaacatgagtgcactgaaaaacacaatttttttcatagggttccgaagatgatccctgagcgggctggcaaggc

SEQ ID NO: 1985 - DNA, 495 bp, Artificial Sequence
  source: /note="Description of Artificial Sequence: Synthetic polynucleotide"
gcctccctcgcgccatcaggttccgaacgccaatatggcctggtgcctggacagagaagactgggagggggctgcagtgggactcacctgaggagacagtgaccagggtgccacggccccagagatcgaagtaccgtcgacgttccgaacgccaatatcaataaaaatcatggttgtgtactccttgttaaggtagctcagctgtaggagaaactgttttttggatgtggatctggagatggtgactggactcttgaggagtgggttggattgtgcactccctcatgacctgtgcacctgattcgctccagtcccttccccggggggtgacggatccagctccagcaggaagcactggttgtaatggagaagcagagatgccacaggccagggggaggatctgtgagggcttcaccaggccaggagtgcaccgagaatcacagttgtcggcatgcacagggttccgaacgccaatactgagcgggctggcaaggc

SEQ ID NO: 1986 - DNA, 495 bp, Artificial Sequence
  source: /note="Description of Artificial Sequence: Synthetic polynucleotide"
gcctccctcgcgccatcaggttccgaatcaagccttggcctggtgcctggacagagaagactgggagggggctgcagtgggactcacctgaggagacagtgaccagggtgccacggccccagagatcgaagtaccgtcgacgttccgaatcaagccttcacagtaatactcagccgtgtcctaggtggtcatggagctgagcttcacagagaactggctcttggttgagtcactgttgatggggacatggacctgggtggagggtgcatgatgtgtattccttgatgatccagtctagtaactgtgccccagccattccagcctgttgcccacgggatggtggattcatctcaaataatatccatggtaaaaaaaagaatccagacacagcacaggcagagggcagtgtctgagggcctcatgggtcctggacctgactcctgcagctgcacctgggacagttccgaatcaagcctctgagcgggctggcaaggc

SEQ ID NO: 1987 - DNA, 495 bp, Artificial Sequence
  source: /note="Description of Artificial Sequence: Synthetic polynucleotide"
gcctccctcgcgccatcaggttccgaaacgtgtgttggcctggtgcctggacagagaagactgggagggggctgcagtgggactcacctgaggagacagtgaccagggtgccacggccccagagatcgaagtaccgtcgacgttccgaaacgtgtgttcacttaaaaatgcgtagttgtgtgttcactgggcacagagctcagctgtaagaactgtttcttggatctggatatggactcttgagcagtgggttgtaatttgtgctcccttcacaacccatgcacctgatccactcctgtccatcttctaggggcaagcagatacaattctagcaggaaacactggttatgatggggaatccagagacagtgcaggtgaggagagggtctgcaaggagtctcaagccagaagtgtgctgagaaacatagttgttgatgttaacaggttctgggcaacacaggttccgaaacgtgtgtctgagcgggctggcaaggc

SEQ ID NO: 1988 - DNA, 495 bp, Artificial Sequence
  source: /note="Description of Artificial Sequence: Synthetic polynucleotide"
gcctccctcgcgccatcaggttccgaatccgtctatggcctggtgcctggacagagaagactgggagggggctgcagtgggactcacctgaggagacagtgaccagggtgccacggccccagagatcgaagtaccgtcgacgttccgaatccgtctatcagctctaaaatacatggctatgtgtttgttcctcacatagttcagctgtaagaagaactactttttggacatggatctggagatggtgactggactcttgagaagaggggagtaatttgtgctccctccatgacctatgcacccgatccactccagtacctcccatgggggcgctgatggatgcagctccagcaggaaacactggttgtgatggagaatgcagagatggcacaggtgagggagaggttctgtgaaggcttcaccaggccaagagtgcaccgagaaatacagttgttggcaggttccgaatccgtctactgagcgggctggcaaggc

SEQ ID NO: 1989 - DNA, 495 bp, Artificial Sequence
  source: /note="Description of Artificial Sequence: Synthetic polynucleotide"
gcctccctcgcgccatcaggttccgaaaagagctgtggcctggtgcctggacagagaagactgggagggggctgcagtgggactcacctgaggagacagtgaccagggtgccacggccccagagatcgaagtaccgtcgacgttccgaaaagagctgtcattcaaaatgtgtagttgtgtgttcactgggcacagagctcagctgtaagaactgtttcttggatctggatatggactcttgagaagtgggatgtaatttttgctccctttacaacccatgaacctgatccactcctgtccatcttctaggggcaagcagatacaattctagcaggacacactggttatgatggggaatccagagacagtgcaggtgagggagagggtctgtgaggatgtctcaagccagaagtgcactggaaaacacagttgttgatgttaacagtttctggacaacacggttccgaaaagagctgctgagcgggctggcaaggc

SEQ ID NO: 1990 - DNA, 495 bp, Artificial Sequence
  source: /note="Description of Artificial Sequence: Synthetic polynucleotide"
gcctccctcgcgccatcaggttccgaatatcgctctggcctggtgcctggacagagaagactgggagggggctgcagtgggactcacctgaggagacagtgaccagggtgccacggccccagagatcgaagtaccgtcgacgttccgaatatcgctctcagctctaaaatacatggctatgtgtttgttgctcacatagttcacctgtaagaagaagtactttttggacatggatctggagatggtgactggactcttgagaagaggggagtaatctgtgctccctccatgacctatgcacccgatccactccagtacctcccatgggggcgctgatggatgcagctccagaaggaaacactggttgtgatggagaatgcagagatggcacaggtgagggagaggttctgtgaaggcttcaccaggccaagagtgcaccgagaaatacagttgttggcaggttccgaatatcgctcctgagcgggctggcaaggc

SEQ ID NO: 1991 - DNA, 495 bp, Artificial Sequence
  source: /note="Description of Artificial Sequence: Synthetic polynucleotide"
gcctccctcgcgccatcaggttccgaatcagatgctggcctggtgcctggacagagaagactgggagggggctgcagtgggactcacctgaggagacagtgaccagggtgccacggccccagagatcgaagtaccgtcgacgttccgaatcagatgctcatgaaagaagaattcatgtgcagacacatctgcttgtctgaagatatagtgcatgtgggaacatgtgggcttgtctgaattcatgataagtgggctggaattcatcctccactcatcacgtatgcacctgacccactcctgtgctttccatccagtgcctacaggaagcactgattgtgacagagaatccagaggcagcacaggtgagtgagggggtttgcaagggcttcaccaggctgataattgactgagaaaaacagttgttagcatgcacaagttctggatgatacattggaaacccgttccgaatcagatgcctgagcgggctggcaaggc

SEQ ID NO: 1992 - DNA, 495 bp, Artificial Sequence
  source: /note="Description of Artificial Sequence: Synthetic polynucleotide"
gcctccctcgcgccatcaggttccgaagtgtagcatggcctggtgcctggacagagaagactgggagggggctgcagtgggactcacctgaggagacagtgaccagggtgccacggccccagagatcgaagtaccgtcgacgttccgaagtgtagcatcaacagtaatacaaaccatgtcctcagatgtcacagagctcaggtatagtcaaaattgtttcttggatgaatctctggagaaggagagttggctctgcagagatggatcatcgtgtgtgtcacccttgcaatgtgttcctgacagcccatggaagcgggctagtggattcagctccagcagtaactgttggttgggatggacaacccagaaatggggcatgtgaggaagagaaaatgaaagtggatagcctgttaccgaaaactgctggactaagacacttgtaagcctgtcaatctcagtggttccgaagtgtagcactgagcgggctggcaaggc

SEQ ID NO: 1993 - DNA, 495 bp, Artificial Sequence
  source: /note="Description of Artificial Sequence: Synthetic polynucleotide"
gcctccctcgcgccatcaggttccgaatggcagtttggcctggtgcctggacagagaagactgggagggggctgcagtgggactcacctgaggagacagtgaccagggtgccacggccccagagatcgaagtaccgtcgacgttccgaatggcagtttcacagccaagatatggaaactaagtgtctgtcaatgggcaaatggataaagacaatgtggtatgtgtacacaacatagcattattatgccttataaaataaggaaatgctgccattttccacaagacaaatggactcccaccaccactagcaatggattttatccattgcagcccctccctgagagccggcagatccaggtccactagtaaggactggttgtgacggagtggccagtaacagtgtaggtgaggcagagggtaagtgtgtgctattcaggtccagggctgactcctgcagctggttccgaatggcagttctgagcgggctggcaaggc

SEQ ID NO: 1994 - DNA, 495 bp, Artificial Sequence
  source: /note="Description of Artificial Sequence: Synthetic polynucleotide"
gcctccctcgcgccatcaggttccgaacagtccaatggcctggtgcctggacagagaagactgggagggggctgcagtgggactcacctgaggagacagtgaccagggtgccacggccccagagatcgaagtaccgtcgacgttccgaacagtccaatcagtgtaaaaattcatggttgtgtactcgttgctcaggtagctcagctgtagaagaaactgtgttttggatgtggatctggagatggtgactggactcttgaggcgtgggttgcgttgtgttctccctcatgacctgtgcacctgattcactccagtcccttccctggggagctgagggatccagctccagcaggaagcactggttgtgatggagaagcagagacagcacagatgagggagagggtctgtgagggcttcgccaggccaagaacgcacgagaaatacagatgtcggcatgcacgttccgaacagtccaactgagcgggctggcaaggc

SEQ ID NO: 1995 - DNA, 495 bp, Artificial Sequence
  source: /note="Description of Artificial Sequence: Synthetic polynucleotide"
gcctccctcgcgccatcaggttccgaagtgtctactggcctggtgcctggacagagaagactgggagggggctgcagtgggactcacctgaggagacagtgaccagggtgccacggccccagagatcgaagtaccgtcgacgttccgaagtgtctactcaagtaatacaaggttgtggcattgttggtcacagaactcagctaaaagaaaatttggttcttggacgtggatctggagatggtgactgagctcatgaggagtgggttagaatttgtgctccctcgtgacctatgccctgatccactcccttgactgaggactggcggatccagctccagcaggaagcactagttgtgatggagaatccagagacagcacaggtgagggagggggtctgtgagggcctcaccaggccaataaatgaccatgaaacacagtggttggtgtgcatggcttctgggttccgaagtgtctacctgagcgggctggcaaggc

SEQ ID NO: 1996 - DNA, 495 bp, Artificial Sequence
  source: /note="Description of Artificial Sequence: Synthetic polynucleotide"
gcctccctcgcgccatcaggttccgaagtacagtgtggcctggtgcctggacagagaagactgggagggggctgcagtgggactcacctgaggagacagtgaccagggtgccacggccccagagatcgaagtaccgtcgacgttccgaagtacagtgtcataaaaatacatggctgtgtgcttgtgactcacttagctcggctgtaggaagaactgctttttggacatggatctggagatggtgactggactcttgaggagtgggttggaatgtgcactccctcatgacctgtgcactggattcactccagtcccttcctggggggtttatgaatgcagctacagcaggaagcactggttgtgatggggaatccagagacagcacaggtgagggagagggtctgtgagggcttcaccaggccaagtgggcactgagaaacacagttgttggcatgcacaggttccgaagtacagtgctgagcgggctggcaaggc

SEQ ID NO: 1997 - DNA, 495 bp, Artificial Sequence
  source: /note="Description of Artificial Sequence: Synthetic polynucleotide"
gcctccctcgcgccatcaggttccgaaggatcatctggcctggtgcctggacagagaagactgggagggggctgcagtgggactcacctgaggagacagtgaccagggtgccacggccccagagatcgaagtaccgtcgacgttccgaaggatcatctcatttaaaacatggctgtgagcttgttgctcacatagctccactgtaaaaacaagtgttttttggacccgaatttggagatggtgactggattcataaggagtgggtgggaatttttgctcccttcatgacgtgtgcgcctggtccactccagtccttcccatgtggactcgtggatccagctccagcaggaaacactggttgtgatggaaaatccagagacagcacaggtgagggagagggtctgcgagggctccaccaggccaagagtgcactaagaaacacagttgtttgtgagcacaggttccgaaggatcatcctgagcgggctggcaaggc

SEQ ID NO: 1998 - DNA, 495 bp, Artificial Sequence
  source: /note="Description of Artificial Sequence: Synthetic polynucleotide"
gcctccctcgcgccatcaggttccgaatattggcgtggcctggtgcctggacagagaagactgggagggggctgcagtgggactcacctgaggagacagtgaccagggtgccacggccccagagatcgaagtaccgtcgacgttccgaatattggcgtcatgaaaaatatatggctatgtgattgttgctcatgtagctcagctgtaggaagaactgtttttggacatggatctggggatggtgactggactcttgaggaaaggggagtaatgtgtgctcccttcatcatctatggacccaatccactccattccctcccagagagggggtgatggatgcagatccaggaggaagcactggttgtgatggagaatgcagagatgacacacatgagggagagggtctttgggggcttcaccaggccaagagtgcaccgagaaacacagttgttggcaggcagttccgaatattggcgctgagcgggctggcaaggc

SEQ ID NO: 1999 - DNA, 495 bp, Artificial Sequence
  source: /note="Description of Artificial Sequence: Synthetic polynucleotide"
gcctccctcgcgccatcaggttccgaaaggcttgatggcctggtgcctggacagagaagactgggagggggctgcagtgggactcacctgaggagacagtgaccagggtgccacggccccagagatcgaagtaccgtcgacgttccgaaaggcttgatcaattaaaattcatggttgtgtacttgttgctcaggtagctcagctacaggaaacactgttttttggatgtggatctggagatagtgactggactcttgaggagtgggttggaatgtgcactccctcatgacctgtgcacctgattcgctccagtcccttccttgcggggggtgatggatgcagctccagcaggaagcactggttgtgatggagaatgcagagacagcacaggtgagagagagggtctgtgagagcttcactagcccaagagtgcaggagaaacacagttgttggcatgcacgttccgaaaggcttgactgagcgggctggcaaggc

SEQ ID NO: 2000 - DNA, 495 bp, Artificial Sequence
  source: /note="Description of Artificial Sequence: Synthetic polynucleotide"
gcctccctcgcgccatcaggttccgaaacacacgttggcctggtgcctggacagagaagactgggagggggctgcagtgggactcacctgaggagacagtgaccagggtgccacggccccagagatcgaagtaccgtcgacgttccgaaacacacgttcagcttaaaaatacatggctatgtgcttgttgctcatgtagctcagctgtaggaagaactgcttttttggacacggatctggggatggtgactggacacttgaggagtgggtggtaatgtgtgctcccttcatgacctatgcacccaatccactccattcccttccctggggggctgatggatccagcttcagcaggaagacctcgttatcacggggaacacagacacagcgcaggtaagggagagggtctgtgagggcttcaccaggccaagagtgcgctgagaaacacagttgttggcatgttccgaaacacacgtctgagcgggctggcaaggc

SEQ ID NO: 2001 - DNA, 495 bp, Artificial Sequence
  source: /note="Description of Artificial Sequence: Synthetic polynucleotide"
gcctccctcgcgccatcaggttccgaatagacggatggcctggtgcctggacagagaagactgggagggggctgcagtgggactcacctgaggagacagtgaccagggtgccacggccccagagatcgaagtaccgtcgacgttccgaatagacggatcaagtaatacatgaccttgtccttggctttcagattggtcattgtaaggcagactgcacttaaaagggtgttgcttgagattgttaatttatttgtactcatggaaagtaaccctgagaattcatacttgatcactcactgttggcacccacacctatccctgttgtgaagcgtgctggaccaagctcatgctgtaaccagtaaaggtgaaaccagaggctttgcaggagagtctcaccactgggctgtaaattttttccccctctgactccatcagtaaacttcacacaggacttccgtgagttccgaatagacggactgagcgggctggcaaggc

SEQ ID NO: 2002 - DNA, 495 bp, Artificial Sequence
  source: /note="Description of Artificial Sequence: Synthetic polynucleotide"
gcctccctcgcgccatcaggttccgaagagcgatatggcctggtgcctggacagagaagactgggagggggctgcagtgggactcacctgaggagacagtgaccagggtgccacggccccagagatcgaagtaccgtcgacgttccgaagagcgatatcaagtaatacactgcctactcctcagctttccagtagataattttaagggagattgtgatgttaagtgttgtccccaggaactgtgaatcttctttgtgctggagcagagcaccactgagaacttccacttgggtcactcatggctaccacccactccagcccctctcctccagccatcagggcccaataaatgctgcagtcagtgaaggtgaatcttgatgctttgcagaagaagctaagagaatagccaggctattttgccaaagacaaaaatatagatccagtaaacctttgtggttttgttccgaagagcgatactgagcgggctggcaaggc

SEQ ID NO: 2003 - DNA, 495 bp, Artificial Sequence
  source: /note="Description of Artificial Sequence: Synthetic polynucleotide"
gcctccctcgcgccatcaggttccgaagcatctgatggcctggtgcctggacagagaagactgggagggggctgcagtgggactcacctgaggagacagtgaccagggtgccacggccccagagatcgaagtaccgtcgacgttccgaagcatctgatcaagtaatacacggacttttcctgagctctcaggttaatcatcttaaaagagaatctcctgaactgagtgtatttgaggattgttaatcatctttttactcaaggagagtcccactgagaacttctatttgaattattgttattacccacacccacccctgtcatgaagcctgctggatcaagcttatgctgttttcagtgaaagtgaatccagaggctttgcagaaaaggcagaattcctggtctgtagtatttctctgtctaactccattagttaacttcacaggggacttctgaaaacagttccgaagcatctgactgagcgggctggcaaggc

SEQ ID NO: 2004 - DNA, 495 bp, Artificial Sequence
  source: /note="Description of Artificial Sequence: Synthetic polynucleotide"
gcctccctcgcgccatcaggttccgaatgctacactggcctggtgcctggacagagaagactgggagggggctgcagtgggactcacctgaggagacagtgaccagggtgccacggccccagagatcgaagtaccgtcgacgttccgaatgctacactcaagtattacaaggccttgtccttgactttcagtttggtccctttaaggtagactgcacatgaaaaggtgtcgcttgggactgttaatttatttgtactcatggagagtaactctgagaactcccacttgatcactcactgtttccacccacaccaatccctgtcatgaagcctgctggaccaagctcatgctgtagccagtaaaggtgaaatcagaggctttgcatgagagtctcagtgaaccactgggctgtacaattttcccccctgactctatcagtaaatttcacacaggacttctggttccgaatgctacacctgagcgggctggcaaggc

SEQ ID NO: 2005 - DNA, 495 bp, Artificial Sequence
  source: /note="Description of Artificial Sequence: Synthetic polynucleotide"
gcctccctcgcgccatcaggttccgaaaactgccatggcctggtgcctggacagagaagactgggagggggctgcagtgggactcacctgaggagacagtgaccagggtgccacggccccagagatcgaagtaccgtcgacgttccgaaaactgccatcactgtaatatacggccttgcccttggctttcaggttggtccttgtaaggtagactgcacttgaaagggtgtcacttgggaatgttgatttatctgtactcatggagagtaacccttagaactcccatatgatctctcactgttgctacccacaccaattcctgttgtgaagcgtgctggaccaagctcatgctgcacccagtaaacccgaaaccagaggctttgcaggacagtctcagtgaactgctgggctgttaaatttttctccttctgactccatcagtaaacatcacacaggacttgttccgaaaactgccactgagcgggctggcaaggc

SEQ ID NO: 2006 - DNA, 495 bp, Artificial Sequence
  source: /note="Description of Artificial Sequence: Synthetic polynucleotide"
gcctccctcgcgccatcaggttccgaattggactgtggcctggtgcctggacagagaagactgggagggggctgcagtgggactcacctgaggagacagtgaccagggtgccacggccccagagatcgaagtaccgtcgacgttccgaattggactgtcaagtaatacacagacttgtcttgggctctcagttttattatcttaaaagagaatcttctgaacagtgtctctgaggactgttaatcttctttgtactgaaggcgagtcccattgagaacttccacttgaattactgttatctccctcaccaacacttgccatgaatcctgctggaccaaacttgttcttttttcagtgaatccaggggctttgcagaacagtctgagaattcttggtctgtagtattttcctgtctgactccactagttaacttcacagaggacttctgcacacacagagggttccgaattggactgctgagcgggctggcaaggc

SEQ ID NO: 2007 - DNA, 495 bp, Artificial Sequence
  source: /note="Description of Artificial Sequence: Synthetic polynucleotide"
gcctccctcgcgccatcaggttccgaatcggtacttggcctggtgcctggacagagaagactgggagggggctgcagtgggactcacctgaggagacagtgaccagggtgccacggccccagagatcgaagtaccgtcgacgttccgaatcggtacttcacagtaataaacggaattttcctgagctctcaggttaatcatcttaagagagaatcatctgaaaagcgtgtctctgaggactgttaatcttctttgtactcaaggagagtcccactgagaacttccacttgaattactgatgttatcacctacacccacccctgtcatgaagcctgctggaccaagcttatgctgttttcagtgaaagtgaatccacagggtttccagaaaagtctgagaattcttggtctgtagtatttctctgagagactccagtaattaacttcacaggggacctctggttccgaatcggtactctgagcgggctggcaaggc

SEQ ID NO: 2008 - DNA, 495 bp, Artificial Sequence
  source: /note="Description of Artificial Sequence: Synthetic polynucleotide"
gcctccctcgcgccatcaggttccgaaccatggattggcctggtgcctggacagagaagactgggagggggctgcagtgggactcacctgaggagacagtgaccagggtgccacggccccagagatcgaagtaccgtcgacgttccgaaccatggattcacacagttaaatgctgccatgttctgggttctcaggctgttcatttgcatgtacagcatgtacttggtgttgtctctggaagtggtgagtctgcccctaacatagtctgcattgtattgatgactttcactacgccatataactgcaacccattccagccccttccctgaggcctggcaaacccagtgaatctcatagatactgaaggtgaaccaagaggctgcacaggagagcctcaggggcccctctcagtgtaccaagtctcccccagactctgtaagctgggcctcaccctggatacgttccgaaccatggatctgagcgggctggcaaggc

SEQ ID NO: 2009 - DNA, 495 bp, Artificial Sequence
  source: /note="Description of Artificial Sequence: Synthetic polynucleotide"
gcctccctcgcgccatcaggttccgaaacgaagattggcctggtgcctggacagagaagactgggagggggctgcagtgggactcacctgaggagacagtgaccagggtgccacggccccagagatcgaagtaccgtcgacgttccgaaacgaagattcacagtaatacactgcctacccctgtgagagccccctcagcttccaagtagattattttaagggagactgtgctggtaattggtgtccctgggaattgtgaatcttcattatgctgatgcagaatatcactgagaacttccacttgaatcaatcactgttaccacccactccagcctctgtcccccagccatctgggctcaatttatgctgtagtcagtgaaggtgaatcttgatgctttgcaaaagaggctaagagaacagccaggctgttttgccaaagataaaaatatagatccagtaagttccgaaacgaagatctgagcgggctggcaaggc

SEQ ID NO: 2010 - DNA, 495 bp, Artificial Sequence
  source: /note="Description of Artificial Sequence: Synthetic polynucleotide"
gcctccctcgcgccatcaggttccgaaactgtggatggcctggtgcctggacagagaagactgggagggggctgcagtgggactcacctgaggagacagtgaccagggtgccacggccccagagatcgaagtaccgtcgacgttccgaaactgtggatcaacagtattacacaaccttgtccttggctttcaggttagtcattgtaaggtagagtgcacgtgaaagggtgtcgctggaccagttaatttatttgtactcatgaagagtaaacctgagcactcccacttgttgactcactgttgccagccaccacaatccctgttgtgaagcctgctggaccaacctcaggctgttgccagaaaaggtgaatccagacgctttgcaagaaagtctcagtgaaccactgggctgtactacgtttacccctctgactccaccactgaacttcatacaggacttgttccgaaactgtggactgagcgggctggcaaggc

SEQ ID NO: 2011 - DNA, 495 bp, Artificial Sequence
  source: /note="Description of Artificial Sequence: Synthetic polynucleotide"
gcctccctcgcgccatcaggttccgaaggtgtcattggcctggtgcctggacagagaagactgggagggggctgcagtgggactcacctgaggagacagtgaccagggtgccacggccccagagatcgaagtaccgtcgacgttccgaaggtgtcattcaagtaatacatggccttctcctcggctctcaggttggtcattttgagggagactgtgctgacaagggtgtccctgaggattatgatttttctttgtattgatggagggtaccactaacaaattccacttgaatccctcgcttttgcctcccacaccaacccctgtcctgaagcctgctgggctgagctcatgctagagtcaatgaaggtaaattcagaggctttgtaaaaaaggctctgagaacagttaggctgtatcatttctcttccagattccaccagtgaacttcttgtaggactctgttccgaaggtgtcatctgagcgggctggcaaggc

SEQ ID NO: 2012 - DNA, 495 bp, Artificial Sequence
  source: /note="Description of Artificial Sequence: Synthetic polynucleotide"
gcctccctcgcgccatcaggttccgaatcgtgaagtggcctggtgcctggacagagaagactgggagggggctgcagtgggactcacctgaggagacagtgaccagggtgccacggccccagagatcgaagtaccgtcgacgttccgaatcgtgaagtcacagtaatacaaggtcttgtccttggctttcacattggtcattttaaggtagactgcacttgaaagggtgttgcttgggactgttaatttacttgtactcatggagagtaaccctgataactcactgttgccacccacacaaatccctgtcatgaagcctgctggaccaagctcatgctgtagccagtacaagtgaaatcagaggctttgcaggagagtctgtgagaaccgctgggctgtacaatgtttccccctctgactccatcagtaagcttcaacaggacttacatgaacacagagggttccgaatcgtgaagctgagcgggctggcaaggc

SEQ ID NO: 2013 - DNA, 495 bp, Artificial Sequence
  source: /note="Description of Artificial Sequence: Synthetic polynucleotide"
gcctccctcgcgccatcaggttccgaacactagcttggcctggtgcctggacagagaagactgggagggggctgcagtgggactcacctgaggagacagtgaccagggtgccacggccccagagatcgaagtaccgtcgacgttccgaacactagcttcacacagtaatacacgcctgcatccccagccatcacacttctcagctgtaagttttcttgttttttactatgtgtttctggagatgctagctctgccctgaaggttggggcttagtgtttcccttaacccatatcacaccaacacactgaagaccttttgatgggagatggtggatccaggaaacagaatgttcagaaattgaatgtgcataggcggcataggtgaggctgagcatgaccaaggggaccactacttcttcctcccattgcacaaggtggtcctcactgtgaacccctgagaagttccgaacactagctctgagcgggctggcaaggc

SEQ ID NO: 2014 - DNA, 495 bp, Artificial Sequence
  source: /note="Description of Artificial Sequence: Synthetic polynucleotide"
gcctccctcgcgccatcaggttccgaaggtcaacttggcctggtgcctggacagagaagactgggagggggctgcagtgggactcacctgaggagacagtgaccagggtgccacggccccagagatcgaagtaccgtcgacgttccgaaggtcaacttcagcacagtagtacacatctatgtcctcagatctctgactgctcagctccatgtaggctgtgctcgtggacgtgtccctggtcatggtgactctgccctgaaacttctgtgcatagcctgtgttaccattgccagagtagctccctaccatccattcaaacccttatccaggggcctgtcacacacagtgaatgtcgtagctggcgaaggtgtatccagagctttgcaggagaccttcactgaggccatggacgctggcaacaggagagtcatcagaagctgggtgagtcatataatcaggagttccgaaggtcaactctgagcgggctggcaaggc

SEQ ID NO: 2015 - DNA, 495 bp, Artificial Sequence
  source: /note="Description of Artificial Sequence: Synthetic polynucleotide"
gcctccctcgcgccatcaggttccgaatacgtacgtggcctggtgcctggacagagaagactgggagggggctgcagtgggactcacctgaggagacagtgaccagggtgccacggccccagagatcgaagtaccgtcgacgttccgaatacgtacgtcaacaggaatacacgaccatgtcttcagatctcaggctgctcagctccatgtaggctgtgctcacggacctgtcactggtaatggtgactctgccccggaacttctgtgcgtagtgtgtgttatcattgtaagggttgatgcatcccaaccactatgcccttgtccagggccctgtcgcacccactgtgtaaagtatttggtgaaggtgtatctggaagcctggccaggagaccttcactgaggacgcaggcttcttcacctcagccccaggctgcaacagctgaacctgggaatggacatcgttccgaatacgtacgctgagcgggctggcaaggc

SEQ ID NO: 2016 - DNA, 495 bp, Artificial Sequence
  source: /note="Description of Artificial Sequence: Synthetic polynucleotide"
gcctccctcgcgccatcaggttccgaaatgacacctggcctggtgcctggacagagaagactgggagggggctgcagtgggactcacctgaggagacagtgaccagggtgccacggccccagagatcgaagtaccgtcgacgttccgaaatgacacctcacacagtaatacatggccgtgtcttcagatctcaggctgctcagctccatgtaggctgtgctcgtggatgtgtccctggtcatggtgactctgccctggaacttctctgcgtagcttatgctgccatcactagggcacatccttcccatccactcaagcccttgtgcatgggcctggcgcacctagtgcatagagtaactggtgaaggtaggtgtatccacaagtcttgcaggagactttcactgatgccccagccttcttcatctcatccccagactgcaccagctgcacctgggactgggttccgaaatgacaccctgagcgggctggcaaggc

SEQ ID NO: 2017 - DNA, 495 bp, Artificial Sequence
  source: /note="Description of Artificial Sequence: Synthetic polynucleotide"
gcctccctcgcgccatcaggttccgaacttcacgatggcctggtgcctggacagagaagactgggagggggctgcagtgggactcacctgaggagacagtgaccagggtgccacggccccagagatcgaagtaccgtcgacgttccgaacttcacgatcacccagtaatacacagccgagtcctcagatctcaggctgctcagctctatgtaggctgtcctcagggacatgtccctggtaatggtgactctgccctggaacttctttgcatagttggtgttaccattgtaaagtgtgatccatctcatcctttcaagcccttgtccaggggcctgttgcaaccagtgcaaggagcagcaagtgaaggtgtatccggaagccttgcaggagaccttcactgaggccccaggcttctttacctcagcctcagactgccccagctgcacctgggagcagacacgttccgaacttcacgactgagcgggctggcaaggc

SEQ ID NO: 2018 - DNA, 495 bp, Artificial Sequence
  source: /note="Description of Artificial Sequence: Synthetic polynucleotide"
gcctccctcgcgccatcaggttccgaaagaatcagtggcctggtgcctggacagagaagactgggagggggctgcagtgggactcacctgaggagacagtgaccagggtgccacggccccagagatcgaagtaccgtcgacgttccgaaagaatcagtcacacagtaatacacgaccatgtcttcagatctcaggctgctcagctccatgtaggctgtgctcatggacctgtcactggtaatggtgactctgccccagaacgtctgtgcatagtgtgtgttatcattgtaagggttgattcatcccatccactatgcccttgtccagggctttgtcacacccaccgtgtaaagtatttggtgaaggtgtatctggaagcctggcaggagaccttcactgaggacccaggcttcttcacctcagccccaggctgcaacagctgaacctgggaatggacaccgttccgaaagaatcagctgagcgggctggcaaggc

SEQ ID NO: 2019 - DNA, 495 bp, Artificial Sequence
  source: /note="Description of Artificial Sequence: Synthetic polynucleotide"
gcctccctcgcgccatcaggttccgaaagttatgctggcctggtgcctggacagagaagactgggagggggctgcagtgggactcacctgaggagacagtgaccagggtgccacggccccagagatcgaagtaccgtcgacgttccgaaagttatgctcatgcacagtaatgtgtggctgtgtccacaatgtccatgttgatcactgttagaaccacttcattcttggaggtgtccttggagataatgagcctactcttcagagatgggctgtagtatttattatcattctaataaatgtgtgcaagccactccagggcctttgctgagggctgacagatctaacccacacccattccagaagtgctgagtgagaacccagagaaggtgcaggtcagcatgagggtctgtgtgggtttcaccagtgcaggaccagactccttcaaggtgacctgggataagttccgaaagttatgcctgagcgggctggcaaggc

SEQ ID NO: 2020 - DNA, 495 bp, Artificial Sequence
  source: /note="Description of Artificial Sequence: Synthetic polynucleotide"
gcctccctcgcgccatcaggttccgaaaggtctcatggcctggtgcctggacagagaagactgggagggggctgcagtgggactcacctgaggagacagtgaccagggtgccacggccccagagatcgaagtaccgtcgacgttccgaaaggtctcatcacagagtcatatgcagctgcatcctctgccctcagtctgttcatttgcagatacagtgagtttttggtattgtctctggaaatggtgaatcggcccttcacagagtctgcgtagtacatggtactaccactaccactaataactgggacccactgcagacccttccctggagcctgggggacccagtgcgtgctatggctactgaaggtgaatccagaggctgcacaggagagtctcagggacacccaggctttgtcaagtttgctccagactctaccagctgcatctcacactggacaccgttccgaaaggtctcactgagcgggctggcaaggc

SEQ ID NO: 2021 - DNA, 495 bp, Artificial Sequence
  source: /note="Description of Artificial Sequence: Synthetic polynucleotide"
gcctccctcgcgccatcaggttccgaagtcatagttggcctggtgcctggacagagaagactgggagggggctgcagtgggactcacctgaggagacagtgaccagggtgccacggccccagagatcgaagtaccgtcgacgttccgaagtcatagttcacacagtaatacacagccatgtcctcgggcctcaggctgttcatttgctgatacaggaagttcctggaattgtctctggagatgatgaatcggcccttcacagagtctgcatagtgcgtcctactgccattccaactaacacccgatacccactccagcccctttcctggagcctggcggacccagttcatgtcactgttactgaaggtgaatccagaggctgcacaggagagtctcagggaccccccaggctctaccaagcctcccccagactccaccagctgcactgttgtacccaggtgttccgaagtcatagtctgagcgggctggcaaggc

SEQ ID NO: 2022 - DNA, 495 bp, Artificial Sequence
  source: /note="Description of Artificial Sequence: Synthetic polynucleotide"
gcctccctcgcgccatcaggttccgaagtgacttgtggcctggtgcctggacagagaagactgggagggggctgcagtgggactcacctgaggagacagtgaccagggtgccacggccccagagatcgaagtaccgtcgacgttccgaagtgacttgtcaacagtaatacacggccgtgtcctcggttttcaggctcttcatttgcagataggtgatgcttttggaatcatctcttgagattgtgaatctgcctttcacagacgtggtctattctgttgtcccaccattagctttgtttctaatgaaacctacccattccagccccttcccgggagcctggcggaccccgctcatgtagtagtaactgaaggtgaatccagaggctgcacaggagagtctcagggaccccccaggctgtaccaagcctcccccagactccaccagctgcacctcacactggttccgaagtgacttgctgagcgggctggcaaggc

SEQ ID NO: 2023 - DNA, 495 bp, Artificial Sequence
  source: /note="Description of Artificial Sequence: Synthetic polynucleotide"
gcctccctcgcgccatcaggttccgaagattgcagtggcctggtgcctggacagagaagactgggagggggctgcagtgggactcacctgaggagacagtgaccagggtgccacggccccagagatcgaagtaccgtcgacgttccgaagattgcagtcaacactaatagagggccgtgtcctcggttttcaggctgttcatttgcagatgaagtgtgttcttggcgttatctctggaggtattgaatcggtccttaccggagtctatgaggtatgtgctacccccattaggattaacttgtcaaaccaactccagcccattccctggagcctggcggacacagttcatgtagtagctactgaaggtgaattgagaggctgcacaggagagtctcggggaccacgcaggctttgccaagcctcccccagactccaccagctgcatctcacactggataccgttccgaagattgcagctgagcgggctggcaaggc

SEQ ID NO: 2024 - DNA, 495 bp, Artificial Sequence
  source: /note="Description of Artificial Sequence: Synthetic polynucleotide"
gcctccctcgcgccatcaggttccgaaactatgactggcctggtgcctggacagagaagactgggagggggctgcagtgggactcacctgaggagacagtgaccagggtgccacggccccagagatcgaagtaccgtcgacgttccgaaactatgactcatgtacagccatacacagccatgtcctcagttctctgactgttcatttgcagatacagagagttcttagcattgtctttggagatggagaatctgcccttcacagagtctgcatggtgtatctgacttccatcatcttttatatctattactcactccagccccttgcctgcagactggtgaactgggctcattcagaagctactgaaggcgaatctagaggctacacaggagagtctcaggaacttcccaggttgtctcaggtcctctgtgggctctatcagctccacctcacactgaacgttccgaaactatgacctgagcgggctggcaaggc

SEQ ID NO: 2025 - DNA, 495 bp, Artificial Sequence
  source: /note="Description of Artificial Sequence: Synthetic polynucleotide"
gcctccctcgcgccatcaggttccgaaatggtcaatggcctggtgcctggacagagaagactgggagggggctgcagtgggactcacctgaggagacagtgaccagggtgccacggccccagagatcgaagtaccgtcgacgttccgaaatggtcaatcacatacagtaacacacagctgtgcccgctgctctcagactgttcattagcaaatacagtgagttcttggcattttctttggagatggtgaatttgctcttcaaagattatgcataacatatctgacttccatcacactgtatatctactactcactccagccccttccctggagcctgggaaaccgagttccttcagtagctactgaaggttaatccagagtctgcacaggagagtctcagggatcccccaggttgtcttgggtcctctccggactccacgagctgtacctctcactagacgttccgaaatggtcaactgagcgggctggcaaggc

SEQ ID NO: 2026 - DNA, 495 bp, Artificial Sequence
  source: /note="Description of Artificial Sequence: Synthetic polynucleotide"
gcctccctcgcgccatcaggttccgaagatggctttggcctggtgcctggacagagaagactgggagggggctgcagtgggactcacctgaggagacagtgaccagggtgccacggccccagagatcgaagtaccgtcgacgttccgaagatggctttcatgtatagccatacacggccacgtcctcagctctctgagtgttcatttgcagatacagagagttcttagcattgtctttggagatggagaatctgcccttcacagagtctgcatggtgtatctgacttccatcatcttttatatctattactcactccagccccttgcctggagactggtgaactcggctcattcagaagctactgaaggcgaatctagaggctacacaggagagtctcaggaacttcccaggttgtctcaggtcctctatggactctatcagctccacctcacactgaacgttccgaagatggcttctgagcgggctggcaaggc

SEQ ID NO: 2027 - DNA, 495 bp, Artificial Sequence
  source: /note="Description of Artificial Sequence: Synthetic polynucleotide"
gcctccctcgcgccatcaggttccgaaagcatatgtggcctggtgcctggacagagaagactgggagggggctgcagtgggactcacctgaggagacagtgaccagggtgccacggccccagagatcgaagtaccgtcgacgttccgaaagcatatgtcacatacagtaacacacagctgtgccctctgctctcagactgttcatttgcaaatacagtgagttcttggcattttctttggagatggtgaatttgctcttcacagattgggcataacatatctgacttccatcacactgtatatctactactcactccagccccttccctggagcctgggaaaccgagctcattcagtagctactgaaggttaatccagagtctgcacaggagagtctcaaggatcccccaggttgtcttgggtcctctccggactccacgagctgtacctctcactagacgttccgaaagcatatgctgagcgggctggcaaggc

SEQ ID NO: 2028 - DNA, 495 bp, Artificial Sequence
  source: /note="Description of Artificial Sequence: Synthetic polynucleotide"
gcctccctcgcgccatcaggttccgaacatatgcttggcctggtgcctggacagagaagactgggagggggctgcagtgggactcacctgaggagacagtgaccagggtgccacggccccagagatcgaagtaccgtcgacgttccgaacatatgcttcaagtaatacacagacctatcctcggctctgacgctgttcatttgcagatacagtgatttcttggcatcatctctggagagggtgaatcgacccttcacagagtctgcatagcttgtgctacctacacaacaactcataaatgagacctactccagccctttcccaggagcctgatggacccagctcatccagtacctaataaaggtactaaaggtgaatccagaggctgcaaaagaaagtctcagggacccccaggctataacaagcctcccaaagactccaccagctgcacctcacactggttccgaacatatgctctgagcgggctggcaaggc

SEQ ID NO: 2029 - DNA, 495 bp, Artificial Sequence
  source: /note="Description of Artificial Sequence: Synthetic polynucleotide"
gcctccctcgcgccatcaggttccgaatcgtcgattggcctggtgcctggacagagaagactgggagggggctgcagtgggactcacctgaggagacagtgaccagggtgccacggccccagagatcgaagtaccgtcgacgttccgaatcgtcgattcaacacagccgagtcctcatctctcagactgttcatttgcaagtacagcatgttcttgccattgtctctagagatggtgaatctacccttcagtgtctgcatagtataggctaccaccactagcactaatgtatgagacccattccagcccctttcttgaagcccggtgggcccagttcatgtcattgcttctcaagatgaatccgcaggctgcacatgagagtctcaggacacccccaaccccaccacagctgtaccaagtctcccccagactctaccagctgcacctcatactgcacaccgttccgaatcgtcgatctgagcgggctggcaaggc

SEQ ID NO: 2030 - DNA, 495 bp, Artificial Sequence
  source: /note="Description of Artificial Sequence: Synthetic polynucleotide"
gcctccctcgcgccatcaggttccgaacagtctgttggcctggtgcctggacagagaagactgggagggggctgcagtgggactcacctgaggagacagtgaccagggtgccacggccccagagatcgaagtaccgtcgacgttccgaacagtctgttcaagtaatacatggccgtgtccttagctttcagactgtccatttgcagatagagcatgctcttagaattgtctcggagattgtgaatcggcccttcacagagtctgcatagtatttctgacttccatcattccagatatgtgccactcactccagccccttccctggagcctggcggacccagctcatgccatagctactaaaggagaatcctgaggctgcacaggagagtctcagggaccccccaggctggaccaagcctcccccagactccaccagctgcacctcacactggacacctgcgttccgaacagtctgtctgagcgggctggcaaggc

SEQ ID NO: 2031 - DNA, 495 bp, Artificial Sequence
  source: /note="Description of Artificial Sequence: Synthetic polynucleotide"
gcctccctcgcgccatcaggttccgaaaacgcgtatggcctggtgcctggacagagaagactgggagggggctgcagtgggactcacctgaggagacagtgaccagggtgccacggccccagagatcgaagtaccgtcgacgttccgaaaacgcgtatcagtacagtaatagatggccgtgtactcggttttcagggtattcacttgcagatacagtgtgttctttgaatcatctcttgagatggtgaacctgcctttcacagatgcagcgcattctgtcgtgtaactgttacgtttggttctaatacggccaacccactccagccctttcccagaagcctggcggatccagtgcattcagaagtcactgaaggtgaatctagaagctgcaaatgagagtctcggggacccacccaggctgtaccaagcctcccccagactccaccagctgcgcctcacggttccgaaaacgcgtactgagcgggctggcaaggc

SEQ ID NO: 2032 - DNA, 495 bp, Artificial Sequence
  source: /note="Description of Artificial Sequence: Synthetic polynucleotide"
gcctccctcgcgccatcaggttccgaagtagttcgtggcctggtgcctggacagagaagactgggagggggctgcagtgggactcacctgaggagacagtgaccagggtgccacggccccagagatcgaagtaccgtcgacgttccgaagtagttcgtcaacaataatacacagccatgtcctcagctatcaggctgttcatttgaagatacaaggacttcttggcgttgtctctggagatggtgaatcggcccatcacggagtctgcatagtatgtatcaccaccagtaccaatagctgatacccactccggacccttccctggagcccggcgaacccagtgcagaacatagctactgaaggcgaatccagaggctgcacaggagggtctcagggaccccccaggctgtaccaagcctcccccagactccaccagctgatcctcacactggacacctgcgttccgaagtagttcgctgagcgggctggcaaggc

SEQ ID NO: 2033 - DNA, 495 bp, Artificial Sequence
  source: /note="Description of Artificial Sequence: Synthetic polynucleotide"
gcctccctcgcgccatcaggttccgaacgaactactggcctggtgcctggacagagaagactgggagggggctgcagtgggactcacctgaggagacagtgaccagggtgccacggccccagagatcgaagtaccgtcgacgttccgaacgaactactcatgactcaataatacagagccatattctcagctctcagactgttcatttgcagatacaacctgtgcttggcattgtctttggagatggtgaatctgaccttcacagagtctgcatattatgtctgacttccatcgtacattatatctactactcactgcagcccctttcctggagcctggcagattcagctgatctagtagctacagaaggtggattcagaggatgcacggcagagtctcaggcacattcagcttgtgccaactctccccaagactccaccatctgcaccccacactagacgttccgaacgaactacctgagcgggctggcaaggc

SEQ ID NO: 2034 - DNA, 495 bp, Artificial Sequence
  source: /note="Description of Artificial Sequence: Synthetic polynucleotide"
gcctccctcgcgccatcaggttccgaattaacgtctggcctggtgcctggacagagaagactgggagggggctgcagtgggactcacctgaggagacagtgaccagggtgccacggccccagagatcgaagtaccgtcgacgttccgaattaacgtctcaacagtaatacacggtcatgtcctcagctctcaggctgttcacttgcagatagagggagttcttggcattgtctctggagatggtcaatcggcccttcacagagtctacatagtatttctcacttccgtcacactttatgtcggccacccactccagccccttctccggagcctggcagacccagtgcatccaggagctactgaaggtgaatccagaggctgcacaggagagtctcagggaccctccaggctgtaccaagcctcacccagactccaccagctgcacctcacactggacaccgttccgaattaacgtcctgagcgggctggcaaggc

SEQ ID NO: 2035 - DNA, 495 bp, Artificial Sequence
  source: /note="Description of Artificial Sequence: Synthetic polynucleotide"
gcctccctcgcgccatcaggttccgaaagcaaccttggcctggtgcctggacagagaagactgggagggggctgcagtgggactcacctgaggagacagtgaccagggtgccacggccccagagatcgaagtaccgtcgacgttccgaaagcaaccttcacatacagtaatacacggccgtgccctctgctctcagactgttcatttgcaaacagagtgagttcttggcattttctttggagatggtgaatctgctcttcacagattgtgcataacatagctgacttctatcctactatatatctactactcactccagccccttccctggagcctgggaatctgagctcattcagtagctactgaaggttaatccagagtctgcacaggagagtctcagggatcccccaagttgtctttggttttcttcagactccaccagctgtacctcacactggacgttccgaaagcaacctctgagcgggctggcaaggc

SEQ ID NO: 2036 - DNA, 495 bp, Artificial Sequence
  source: /note="Description of Artificial Sequence: Synthetic polynucleotide"
gcctccctcgcgccatcaggttccgaattctcgagtggcctggtgcctggacagagaagactgggagggggctgcagtgggactcacctgaggagacagtgaccagggtgccacggccccagagatcgaagtaccgtcgacgttccgaattctcgagtcaacagtaatacacagccttgtccttggctttcaggttggtcattgtaaggtagactgcacatgaaaaggtgtcgcttgggactgttaatttatttgtactcatggagagtaactctgagaactcccacttgatcactcactgtttccacccacaccaatccctgtcatgaagcctgctggaccaagctcatgctgtagccagtaaaggtgaaatcagaggctttgcaggagagtctcagtgaaccactgggctgtacaattttctgcctctgactccatcaataaacttcacacaggacttgttccgaattctcgagctgagcgggctggcaaggc

SEQ ID NO: 2037 - DNA, 495 bp, Artificial Sequence
  source: /note="Description of Artificial Sequence: Synthetic polynucleotide"
gcctccctcgcgccatcaggttccgaaactctacgtggcctggtgcctggacagagaagactgggagggggctgcagtgggactcacctgaggagacagtgaccagggtgccacggccccagagatcgaagtaccgtcgacgttccgaaactctacgtcaacacagtaatacacagccatgtcgtcggctctcaggctgttcatttgcagatacagtgaattctgggcattgtctctagagatggtgaatcagcccttcacagagtctgtgtagagtacggtatcaccacttgtactaataactgagacccactccaaaccctttcctggagcctggtggacccagtgcatagcagagctactgaaggtgaatccagaggctgcacaggagagtctcagagaccctcccagtctttactaagcctcccccagactccaccagctgcacctcacactggacgttccgaaactctacgctgagcgggctggcaaggc

SEQ ID NO: 2038 - DNA, 495 bp, Artificial Sequence
  source: /note="Description of Artificial Sequence: Synthetic polynucleotide"
gcctccctcgcgccatcaggttccgaataccggaatggcctggtgcctggacagagaagactgggagggggctgcagtgggactcacctgaggagacagtgaccagggtgccacggccccagagatcgaagtaccgtcgacgttccgaataccggaatcaacagtagtacacaactgtgccctcggctctcaggctgttcatttgcagagacagtgaattctgggcattgtctctggagatggtgaatcggcccttcacagagtctgtgtagagtacggtatcaccacttgtactaataactgagacccactacaaaccctttcttggagcctggcggacccagtgcatagcagagctactgaaggtgaatccagaggctgcacaggagagtctcagggaccccccaggctggaccaagccttccccagactccaccagctgcacctcacactggacaccgttccgaataccggaactgagcgggctggcaaggc

SEQ ID NO: 2039 - DNA, 495 bp, Artificial Sequence
  source: /note="Description of Artificial Sequence: Synthetic polynucleotide"
gcctccctcgcgccatcaggttccgaacgaattgctggcctggtgcctggacagagaagactgggagggggctgcagtgggactcacctgaggagacagtgaccagggtgccacggccccagagatcgaagtaccgtcgacgttccgaacgaattgctcatgtacagccatgcatggtcatgtcctcagctctcagactgttcgtttggagatacggtgagttcttagcattgtctttggagatggtgaatctgcccttcacagagtctgcatggtatatctgacttccatcatattttacatctattactccctccagccccttccctagagtctcattgacccagctcattcagtagctactgaaggtgaatccagaggctacacaggagagtctcaggaacttcccaagttgtctcaggccctctatggactctatcagctccacctcacactgaacgttccgaacgaattgcctgagcgggctggcaaggc

SEQ ID NO: 2040 - DNA, 495 bp, Artificial Sequence
  source: /note="Description of Artificial Sequence: Synthetic polynucleotide"
gcctccctcgcgccatcaggttccgaattcgctcatggcctggtgcctggacagagaagactgggagggggctgcagtgggactcacctgaggagacagtgaccagggtgccacggccccagagatcgaagtaccgtcgacgttccgaattcgctcatcagtatagtaatacacggccgtgtcctcggttttcaggctgttcatttgcagataggcgatgcttttggaatcatcgcttgagatggtgaatctgcctttcacagacgcggcgtattctgttgttccacgattagttttgtttttagtgaaacctacccactccagcccctttcctggagcccggcagatccactgcatgcagtagttaacggaaggtgaatccagaggctgcacaggagagtctcagggaccccccaggctgtaccaagcctcccccagactccaccagctgcacctcacagttccgaattcgctcactgagcgggctggcaaggc

SEQ ID NO: 2041 - DNA, 495 bp, Artificial Sequence
  source: /note="Description of Artificial Sequence: Synthetic polynucleotide"
gcctccctcgcgccatcaggttccgaagacgttaatggcctggtgcctggacagagaagactgggagggggctgcagtgggactcacctgaggagacagtgaccagggtgccacggccccagagatcgaagtaccgtcgacgttccgaagacgttaatcaacagtaatacacggccgtgtcctcggctctcaggctgttcatttgcagataggtgatgcttttggaatcatctcttgagattgtgaatctgcctttcacagacgtggtctattctgttgtcccaccattagctttgtttctaatgaaacctacccactccagccccttcccgggagcctggcggacccagctcatgtagtagtcactgaaggtgaatccagaggctgcacaggagagtctcagggaccccccaggctggaccaagcctcccccggactccaccagctgcacctcacactggttccgaagacgttaactgagcgggctggcaaggc

SEQ ID NO: 2042 - DNA, 495 bp, Artificial Sequence
  source: /note="Description of Artificial Sequence: Synthetic polynucleotide"
gcctccctcgcgccatcaggttccgaacgtagagttggcctggtgcctggacagagaagactgggagggggctgcagtgggactcacctgaggagacagtgaccagggtgccacggccccagagatcgaagtaccgtcgacgttccgaacgtagagttcacacagtaatacgtggctgtgtactcagctctcaaactgttcatttccagataagagtgtgttcttggcattgtttctggagatggggaatcagaacttcccagaatgtgcatagcgtatgctactcccatcagtactaatacatgagacccactccagtctgttccctggagcctggcaggcccagtgcatccagtggctactgaaggcaaatccagaggctgcacaggacagtctcagggacccccacccccaccgcgccaggctgtaccaagtctcccccaggctccaacaactgcgcgttccgaacgtagagtctgagcgggctggcaaggc

SEQ ID NO: 2043 - DNA, 495 bp, Artificial Sequence
  source: /note="Description of Artificial Sequence: Synthetic polynucleotide"
gcctccctcgcgccatcaggttccgaattccggtatggcctggtgcctggacagagaagactgggagggggctgcagtgggactcacctgaggagacagtgaccagggtgccacggccccagagatcgaagtaccgtcgacgttccgaattccggtatcacagtaatagacggccatggtgtcagcaatgaaactgtttatttgcagatacagtgagttcttggtgttttctctggagatggtcaaccggcccttcacagagtctgagtagtatatgcctccaccactagcattaatgtaagacccactccagtcccttccctggagcttggtccacctagtgcatgccatagttactgaaagtgtatccagaggctgcacaggagagtcacatggaccccccaagctgtaccaagcctcccccagactctaccagctacacttcacattggacacctgcgttccgaattccggtactgagcgggctggcaaggc

SEQ ID NO: 2044 - DNA, 495 bp, Artificial Sequence
  source: /note="Description of Artificial Sequence: Synthetic polynucleotide"
gcctccctcgcgccatcaggttccgaagcaattcgtggcctggtgcctggacagagaagactgggagggggctgcagtgggactcacctgaggagacagtgaccagggtgccacggccccagagatcgaagtaccgtcgacgttccgaagcaattcgtcacatacagtaacacacagctgtgccctctgctctcagactgttcatttgcaaatacagtgagttcttggcattttctttggagacggtgaatctgctcgtcacagattgtgcataacatatctgacttccatcacactgtatatctactactcactccagccccttccctggagcctgggaaaccgagctcattcagtagctactgaaggttaatccagaggctgcacaggagagtctcagggaacccaggttgtcttgggtcctctccagactccaccagctgtacctcacactggacacgttccgaagcaattcgctgagcgggctggcaaggc

SEQ ID NO: 2045 - DNA, 495 bp, Artificial Sequence
  source: /note="Description of Artificial Sequence: Synthetic polynucleotide"
gcctccctcgcgccatcaggttccgaatgagcgaatggcctggtgcctggacagagaagactgggagggggctgcagtgggactcacctgaggagacagtgaccagggtgccacggccccagagatcgaagtaccgtcgacgttccgaatgagcgaatcaacagtaatacacagccgtgtcctcggctctcaggctgttcatttgcagatacagtgagttcttggcgttgtctctggagatggtgaatcggcccttcacagagtctgcgtagtatatggtactactactactaatggatgagacccactccagccccttccctggagcctggcggacccagttcatgtagtagtcactgaaggtgaatccagaggctgcacaggagagtctcagggaccccccaggctttaccaagcctcccccagactccaccagctgcacctcacactggacacctgcgttccgaatgagcgaactgagcgggctggcaaggc

SEQ ID NO: 2046 - DNA, 495 bp, Artificial Sequence
  source: /note="Description of Artificial Sequence: Synthetic polynucleotide"
gcctccctcgcgccatcaggttccgaatactaagctggcctggtgcctggacagagaagactgggagggggctgcagtgggactcacctgaggagacagtgaccagggtgccacggccccagagatcgaagtaccgtcgacgttccgaatactaagctcaacagtaatacacggccgtgtccgcggcggtcacagagctcagcttcaggtagaactggttcttggacgtgtctacggacatggtgattcgactcttgagggacgggttgtagtaggtgctcccactatgatggatttccccaatccactccagccccttccctgggggctggcggacccagattcaccagttaccactgctgatggagtcaccagagacagcgcagatgagggacagggtctccgaaggcttcaccagtcctgggcccgactcctgcagctgcacctgggacaggaccccgttccgaatactaagcctgagcgggctggcaaggc

SEQ ID NO: 2047 - DNA, 495 bp, Artificial Sequence
  source: /note="Description of Artificial Sequence: Synthetic polynucleotide"
gcctccctcgcgccatcaggttccgaatggcgtattggcctggtgcctggacagagaagactgggagggggctgcagtgggactcacctgaggagacagtgaccagggtgccacggccccagagatcgaagtaccgtcgacgttccgaatggcgtattcactgcgcccgccccctccgcctccctgcggtcacagagctcagcttcagggaaaactggttcttggacgtttctattgacatggtgactcaactcctgagggacggggtgtagtagctcctcccactataatagatgtatccaatccattccagccccttccctggggactggcggaccagctccaccagttaccactgctgatggagtcaccagagacagcgcatgtgagggacagggtctccgaagcttcaccagtcctgggccccactcctgcagctgcactgggacaggacccctgtgttccgaatggcgtatctgagcgggctggcaaggc

SEQ ID NO: 2048 - DNA, 495 bp, Artificial Sequence
  source: /note="Description of Artificial Sequence: Synthetic polynucleotide"
gcctccctcgcgccatcaggttccgaagataaccatggcctggtgcctggacagagaagactgggagggggctgcagtgggactcacctgaggagacagtgaccagggtgccacggccccagagatcgaagtaccgtcgacgttccgaagataaccatcattagatggtccctctcacacaataatacatggcggcgtccgaggccttcaggctgctccactgcaggtaggcggtgctgctggagctgtcggctgagatggtgacgtggccttggaaggatgggctgtatctggtatcagagttcccaggatagatgctccccatccactccagttctttcccgggcatctggcgcacccagtggatccagtagctggtaaagctgtatccagaagtcttacaggagatcctcagagactccccgggtcttttcacctctgctgcagactgcaacagctggttccgaagataaccactgagcgggctggcaaggc

SEQ ID NO: 2049 - DNA, 495 bp, Artificial Sequence
  source: /note="Description of Artificial Sequence: Synthetic polynucleotide"
gcctccctcgcgccatcaggttccgaactagtgaatggcctggtgcctggacagagaagactgggagggggctgcagtgggactcacctgaggagacagtgaccagggtgccacggccccagagatcgaagtaccgtcgacgttccgaactagtgaatcagcacgtgtcctcagcctttaggctgctgatatgaagatatgccatgctgacggaggtgtccatggagaagacaaaccgtcctgtgaagccctgggcatacgttaggttcccagtgttggtgttgatccatcccatttcctcaagcccttgtccatgggcctgtcatacccagctgatagcatagcttgtgaaggtgtatccagaagccttgcaggaaaccttcaatgaggctccaggcttcttcacctcaggcccagactgcaccagctgcacctgtgagtggacacctgtggagaggaggttccgaactagtgaactgagcgggctggcaaggc

SEQ ID NO: 2050 - DNA, 495 bp, Artificial Sequence
  source: /note="Description of Artificial Sequence: Synthetic polynucleotide"
gcctccctcgcgccatcaggttccgaaacgttcactggcctggtgcctggacagagaagactgggagggggctgcagtgggactcacctgaggagacagtgaccagggtgccacggccccagagatcgaagtaccgtcgacgttccgaaacgttcactcaacagtaatactcggccgtgtcctcagcctttaggctgctgatctgaagacacgccgtgctgacagacgtgtccatggagaagacaaaccatcctgtgaagccgtgggtatacgttgggttcccagtgtaggtgatgatccatcacatccactcaaagccctgtccaggggtctatcatacccaattcataccatagatggtgaaggtgtaaccagaagacttataggagaccttcactgaggccccaggcttcttcacctcaggcccagactgcaccagctgcagggagtgggcacctgtgttccgaaacgttcacctgagcgggctggcaaggc

SEQ ID NO: 2051 - DNA, 448 bp, Artificial Sequence
  source: /note="Description of Artificial Sequence: Synthetic polynucleotide"
gcctccctcgcgccatcaggttccgaaattacgcttggcctggtgcctggacagagaagactgggagggggctgcagtgggactcacctgaggagacagtgaccagggtgccacggccccagagatcgaagtaccgtcgacgttccgaaattacgcttcatctctcatacagtcatacacggccgtgtcctcagcctttaggctgctgatcttcagatacgccatgctgacagaggtgtccatggagaatagaaaccgtcctgtgaagccgttggtatatgttgggttcccagtgtaggtgatgatccatcccatccactcaagcccttgtccaggggctggtcacactgaattcataccatactggctgcatagtattccatgatttacatatatcatattttatctaatcagttccgaaattacgctctgagcgggctggcaaggc

SEQ ID NO: 2052 - DNA, 495 bp, Artificial Sequence
  source: /note="Description of Artificial Sequence: Synthetic polynucleotide"
gcctccctcgcgccatcaggttccgaacattgagttggcctggtgcctggacagagaagactgggagggggctgcagtgggactcacctgaggagacagtgaccagggtgccacggccccagagatcgaagtaccgtcgacgttccgaacattgagttcaacacagtaataaatggctgcatcctcagtctttaggcagctagtctgcagatccgccgtgctgacagaggtgtccatggagaagacaaaccgtgtgtgaatctgtgggcatacattgggttcaccagggtaggatgatccatcccatccactcaagcccctgtcctggggtctgtcgtatccaattcataccataggtgatgacagtttaaccagacaccttgcaggagaccttcgccgaggccccaggctgcttcacctcaggcccagactgcaccagctgcactcgggagtgggcaccgttccgaacattgagtctgagcgggctggcaaggc

SEQ ID NO: 2053 - DNA, 495 bp, Artificial Sequence
  source: /note="Description of Artificial Sequence: Synthetic polynucleotide"
gcctccctcgcgccatcagcgttacttcttggttaccaggacagaggacgctgggcccagagaaaggaggcagaaggaaagccatcttacctgaagagacggtgaccattgtcccttggccccagatatcaaaaggtcgaccgttacttcttggttatcaacagtaatacacggccgtgtcgtcagatctcagcctgctcagctccatgtaggctgtgctgatggacgtgtccctggtcatggtgaccctgccctgaaacttctgtgcatagtttgtgccaccactgttagggttgatccatcccatccactcaagcccttgtccaggggcctgtcgcacccagtgcatatagtagccggtgaaggtgtatccagaagccttgcaggagaccttcactgaggccccaggcttcttcacctcagccccagactgcaccagctgcacctgggagtgggctcccgttacttcttggttactgagcgggctggcaaggc

SEQ ID NO: 2054 - DNA, 495 bp, Artificial Sequence
  source: /note="Description of Artificial Sequence: Synthetic polynucleotide"
gcctccctcgcgccatcagcgttacttacctcttgccaggacagaggacgctgggcccagagaaaggaggcagaaggaaagccatcttacctgaagagacggtgaccattgtcccttggccccagatatcaaaaggtcgaccgttacttacctcttgtcaacagtaatacacagccatgtcctcagatctcaggctgctcagctccatgtaggctgtgctcgcggatgtgtccctggtaatggtgactctgccctggaactcctgtgaatattttgtgttaccattgccagcgttgctccatcccatccactcaagcctttgtccgggggcctggcgcacccaatgcatagcatagctagtgaaggtgtatccagaagccttgcaggaaaccttcactgaggccccaggcttcttcacctcagccccagactgcaccagctgaacctgggagtggacacccgttacttacctcttgctgagcgggctggcaaggc

SEQ ID NO: 2055 - DNA, 495 bp, Artificial Sequence
  source: /note="Description of Artificial Sequence: Synthetic polynucleotide"
gcctccctcgcgccatcagcgttacttctgattctccaggacagaggacgctgggcccagagaaaggaggcagaaggaaagccatcttacctgaagagacggtgaccattgtcccttggccccagatatcaaaaggtcgaccgttacttctgattcttcaacagtaatacacggccgtgtcctcagatctcaggctgctcagctccatgtaggctgtgcttatggaggtgttcctggtcatggtgactctgccctggaacttctgtgcatagcctgtgttaccactgttagggttcatccatcccatccactcaagcccttgtccagtggcctgtcgcacccagttgatatcataactggtgaaggtgtatccagaagccttgcaggagaccttcactgaggccccaggcttcttcacctcagccccagactgcaccagctgcacctgggagtgggcacccgttacttctgattctctgagcgggctggcaaggc

SEQ ID NO: 2056 - DNA, 495 bp, Artificial Sequence
  source: /note="Description of Artificial Sequence: Synthetic polynucleotide"
gcctccctcgcgccatcagcgttacttagtaccgaccaggacagaggacgctgggcccagagaaaggaggcagaaggaaagccatcttacctgaagagacggtgaccattgtcccttggccccagatatcaaaaggtcgaccgttacttagtaccgatcaacagtaatacacggccgtgtcgtcagatctcaggctcctcagctccatgtaggctgtgctcgtggatgtgtctgtggtcatggtgactctgccctggagcttctgtgcatagtttgtgttaccattgtaagcgctgatccatcccatccactcaagcccttgtccaggggcctgtcgcacccagctgataccatagctggtaaaggtgtaaccagaagccttgcaggagaccttcactgaggccccaggcttcttcacctcagctccagactgcaccagctgaacctgggagtgggcacccgttacttagtaccgactgagcgggctggcaaggc

SEQ ID NO: 2057 - DNA, 495 bp, Artificial Sequence
  source: /note="Description of Artificial Sequence: Synthetic polynucleotide"
gcctccctcgcgccatcagcgttacttatccatggccaggacagaggacgctgggcccagagaaaggaggcagaaggaaagccatcttacctgaagagacggtgaccattgtcccttggccccagatatcaaaaggtcgaccgttacttatccatggtcaacagtaatacacggccgtgtcctcagatctcaggctgctcagctccatgtaggctgtgtctgtagatgtgtcctcggtcatggtgactctgccctggaacttctgtgcgtagattgtttcaccatcttcaggatcaaaacctcccatccactcaagcccttttccaggagcctgtcgcacccagtgcatggataattcagtgagggtgtatccggaaaccttgcaggagaccttcactgaggccccaggcttcttcacctcagccccagactgtaccagctggacctgggcgtgggtgcccgttacttatccatggctgagcgggctggcaaggc

SEQ ID NO: 2058 - DNA, 495 bp, Artificial Sequence
  source: /note="Description of Artificial Sequence: Synthetic polynucleotide"
gcctccctcgcgccatcagcgttacttgtagcagtccaggacagaggacgctgggcccagagaaaggaggcagaaggaaagccatcttacctgaagagacggtgaccattgtcccttggccccagatatcaaaaggtcgaccgttacttgtagcagttcaacagtaatacatggctgtgtcctcagatctcaggctgctcagctccatgtaggctgtgctcatagacctgtccctggtaatggtgactctgtcctggaatttctgtgcgtagttggtgttaccattgaaaggtgtgatccatcccatccactcaagcgcttgtccgggggcctgtcgcacccagtgcaggtagcggtaggtgaaggtgtatccggaagccttgcaggaaaccttcactgaggacccagtcttcttcacctcagccccagactgcaccagctgcatctgggagtaggcatccgttacttgtagcagtctgagcgggctggcaaggc

SEQ ID NO: 2059 - DNA, 495 bp, Artificial Sequence
  source: /note="Description of Artificial Sequence: Synthetic polynucleotide"
gcctccctcgcgccatcagcgttacttatcttcgtccaggacagaggacgctgggcccagagaaaggaggcagaaggaaagccatcttacctgaagagacggtgaccattgtcccttggccccagatatcaaaaggtcgaccgttacttatcttcgttcaacagtaatacacggccgtgtcctcagatctcaggctgctcagctccatgtagactgtgctcgtggacgtgtccctggtcatggtgactctgccctggaacttctgtgcgtagcttgtgctaccaccactagggttgattattcccatccactcaagcccttgtccaggggcctgtcgcacccagtgcatatagtagctggtgaaggtgtatccagatgccttgcaggaaaccttcactgaggccccaggcttcttcacctcagccccagactgcaccagctgcacctgggagtgagcacccgttacttatcttcgtctgagcgggctggcaaggc

SEQ ID NO: 2060 - DNA, 495 bp, Artificial Sequence
  source: /note="Description of Artificial Sequence: Synthetic polynucleotide"
gcctccctcgcgccatcagcgttactttccacagtccaggacagaggacgctgggcccagagaaaggaggcagaaggaaagccatcttacctgaagagacggtgaccattgtcccttggccccagatatcaaaaggtcgaccgttactttccacagttcaacagtaatacacggccgtgtcctcggatctcaggctgctcagctccatgtaggctgtgcttgtggacatgtccctggtaatggtgactctttcctggaacttctgtgcgtagtttgtgttaccactgccaacgacgatccatcctatccactcaaggcgttgtccacgagcctgtcgcacccactgcatagcagagctagtaaaggtgaatccagaagccttgcaggagaccttcactgaggtcccaggcttcttcacctcaggcccagactgcaccagctgcatttgggagtgggcacccgttactttccacagtctgagcgggctggcaaggc

SEQ ID NO: 2061 - DNA, 495 bp, Artificial Sequence
  source: /note="Description of Artificial Sequence: Synthetic polynucleotide"
gcctccctcgcgccatcagcgttacttagctagtgccaggacagaggacgctgggcccagagaaaggaggcagaaggaaagccatcttacctgaagagacggtgaccattgtcccttggccccagatatcaaaaggtcgaccgttacttagctagtgtcaacagtaatacacggccgtgtcctcagatctcaggctgctcagctccatgtaggctgtgctcgtggatttgtccgcggtaatcgtgactctgccctggaacttctgtgcgtagtttgctgtaccaaagatagggatgatccctcccatccactcaagcccttgtccaggggcctgtcgcacccagctgatagcatagctgctgaaggtgcctccagaagccttgcaggagaccttcaccgaggacccaggcttcttcacctcagccccagactgcaccagctgcacctgggactggacacccgttacttagctagtgctgagcgggctggcaaggc

SEQ ID NO: 2062 - DNA, 495 bp, Artificial Sequence
  source: /note="Description of Artificial Sequence: Synthetic polynucleotide"
gcctccctcgcgccatcagcgttactttaaccaagccaggacagaggacgctgggcccagagaaaggaggcagaaggaaagccatcttacctgaagagacggtgaccattgtcccttggccccagatatcaaaaggtcgaccgttactttaaccaagtcaatagtaatacacagccatgtcctcagatgtcaggctgctcaggtctgtgtaggctgtggttgtggacatgtccctggtcatggtgaatctgccctgaaacttcttggcatagcttgggctaccattgccagggttgatccatcccatccactcaagcccttgtccaggggactgttgcacccaatgtataccgtagctggtgatggtaaacccagaaaaactacaggagactttcactgaggccccagacttcctcacctcagcccaagactgcaccagctggacctgggagtgggcacccgttactttaaccaagctgagcgggctggcaaggc

SEQ ID NO: 2063 - DNA, 495 bp, Artificial Sequence
  source: /note="Description of Artificial Sequence: Synthetic polynucleotide"
gcctccctcgcgccatcagcgttacttcaagaggtccaggacagaggacgctgggcccagagaaaggaggcagaaggaaagccatcttacctgaagagacggtgaccattgtcccttggccccagatatcaaaaggtcgaccgttacttcaagaggttcaacagtaatacacggccgtgtcctcagatctcaggctgctcagctccatgtaggctgtgtctgtagacgtgtccgcggttatggtgactctgccctggaacttctctgcgtatattgtttcaccatcttcaggatcaacaagtcccatccactcaagcccttttccaggggcctgttgcacccagtgcatgtagtagtcggtgaaggtgtatccagaaaccttgcaggagattttcactgtagccccaggcttcttcacctcagccccagactgtaccagctggacctcggcgtgggtgcccgttacttcaagaggtctgagcgggctggcaaggc

SEQ ID NO: 2064 - DNA, 495 bp, Artificial Sequence
  source: /note="Description of Artificial Sequence: Synthetic polynucleotide"
gcctccctcgcgccatcagcgttacttagttgaccccaggacagaggacgctgggcccagagaaaggaggcagaaggaaagccatcttacctgaagagacggtgaccattgtcccttggccccagatatcaaaaggtcgaccgttacttagttgacctcatgcacagtaatatgtggctgtgtccacagggtccatgttggtcattgtaaggaccacctggtttttggaggtgtccttggtgatggtgagcctgctcttcagagatgggctgtagcgcttatcatcattccaataaatgagtgcaagccactccagggcctttcctgggggctgacggatccagcccacacccactccactagtgctgagtgagaacccagagaaggtgcaggtcagcgtgagggtctgtgtgggtttcaccagcgtaggaccagactccttcaaggtgatctgggacaacgttacttagttgaccctgagcgggctggcaaggc

SEQ ID NO: 2065 - DNA, 495 bp, Artificial Sequence
  source: /note="Description of Artificial Sequence: Synthetic polynucleotide"
gcctccctcgcgccatcagcgttacttcagcatatccaggacagaggacgctgggcccagagaaaggaggcagaaggaaagccatcttacctgaagagacggtgaccattgtcccttggccccagatatcaaaaggtcgaccgttacttcagcatattcatgcacagtaatatgtggctgtgtccacagggtccatgttggtcatggtaaggaccacctggcttttggaggtgtccttggagatggtgagcctgctcttcagagatgtgctgtaggatttttcgtcattcgaaaaaatgtgtgcaagccactccagggccttccctgggggctgacggatccagctcacacccattctagcattgctgagtgagaacccagagacggtgcaggtcagcgtgagggtctctgtgggtttcaccagcacaggaccagactccttcaaggtgacctgggacaacgttacttcagcatatctgagcgggctggcaaggc

SEQ ID NO: 2066 - DNA, 495 bp, Artificial Sequence
  source: /note="Description of Artificial Sequence: Synthetic polynucleotide"
gcctccctcgcgccatcagcgttacttgcaggattccaggacagaggacgctgggcccagagaaaggaggcagaaggaaagccatcttacctgaagagacggtgaccattgtcccttggccccagatatcaaaaggtcgaccgttacttgcaggatttcatgcacaataatacgtggctgtgtccacagggtccatgttggtcattgtaaggaccacctggtttttggaggtgtccttggagatggtgagcctggtcttcagagatgtgctgtagtatttatcatcatcccaatcaatgagtgcaagccactccagggccttccctgggggctgacggatccagctcacacacattccactagtgctgagtgagaacccagagaaggtgcaggtcagtgtgagggtctgtgtgggtttcaccagcgcaggaccagactccctcaaggtgacctgggataacgttacttgcaggattctgagcgggctggcaaggc

SEQ ID NO: 2067 - DNA, 495 bp, Artificial Sequence
  source: /note="Description of Artificial Sequence: Synthetic polynucleotide"
gcctccctcgcgccatcagcgttacttgtccattcccaggacagaggacgctgggcccagagaaaggaggcagaaggaaagccatcttacctgaagagacggtgaccattgtcccttggccccagatatcaaaaggtcgaccgttacttgtccattctcaacagtaatacacagccgtgtcctcggctctcaggctgttcatttgcagatacagtgagttcttggcgttgtctctggagatggtgaatcggcccttcacagagtccacatagtatttctcacttccatcttgctttatgttggccacccactccagccccttccctggagcctggcggacccagctcatccaatagctactaaaggtgaatccagaggctgcacaggagagtctcagggaccccccaggctggaccaagcctcccccagactccaccagctgcacctcacactggacacccgttacttgtccattcctgagcgggctggcaaggc

SEQ ID NO: 2068 - DNA, 495 bp, Artificial Sequence
  source: /note="Description of Artificial Sequence: Synthetic polynucleotide"
gcctccctcgcgccatcagcgttacttgcataactccaggacagaggacgctgggcccagagaaaggaggcagaaggaaagccatcttacctgaagagacggtgaccattgtcccttggccccagatatcaaaaggtcgaccgttacttgcataacttcatgcacagtaatacaaggccgtgtcctcagctctcagactgttcatttgcagatacagggagttcttggcgttgtctctggagatggtgaatcggcccttcacagagtccgcatagcctatgctaccactattccaactaatacctgagacccactccaggcccttccctggagcttgccggacccagtgcatggcataatcatcaaaggtgaatccagaggctgcacaggagagtctcagggacctgccaggctgtaccaagcctcccccagactccaccagctgcacttcacactggaccgttacttgcataactctgagcgggctggcaaggc

SEQ ID NO: 2069 - DNA, 495 bp, Artificial Sequence
  source: /note="Description of Artificial Sequence: Synthetic polynucleotide"
gcctccctcgcgccatcagcgttacttatatgctgccaggacagaggacgctgggcccagagaaaggaggcagaaggaaagccatcttacctgaagagacggtgaccattgtcccttggccccagatatcaaaaggtcgaccgttacttatatgctgtcaacagtaatacacggccgtgtcctcggctctcaggctgttcatttgcagatacagtgagttcttggcgttgtccctggagatggtgaatcggcccttcacagagtctgcgtagtatatggtactaccactactactaatgtatgaaacccactccagccccttccctggagcctggcggatccagctcatgtagtagtcactgaaggtgaatccagaggctgcacaggagagtctcagggaccctccaggcttgaccaagcctcccccagactccaccagctgcacctgacactggacacccgttacttatatgctgctgagcgggctggcaaggc

SEQ ID NO: 2070 - DNA, 495 bp, Artificial Sequence
  source: /note="Description of Artificial Sequence: Synthetic polynucleotide"
gcctccctcgcgccatcagcgttacttaatcctgcccaggacagaggacgctgggcccagagaaaggaggcagaaggaaagccatcttacctgaagagacggtgaccattgtcccttggccccagatatcaaaaggtcgaccgttacttaatcctgctcaacagtaatacacagccgtgtccccggctctcaggctgttcatttgaagatacaaggagttcttggcattttctctggagatggtgaatcggcccttcacggagcctggatagtatgtgtcaccagcagtaccaatagctgagacccactccagaccttttcctgtagcttggcggacccagtgcatgtcgtagctactgaaggtgaatccagaggctgcacaggagagtctcagggaccccccaggctgtaccaagcctcccccagactccaccagctgcacctcacactggacacctgccgttacttaatcctgcctgagcgggctggcaaggc

SEQ ID NO: 2071 - DNA, 495 bp, Artificial Sequence
  source: /note="Description of Artificial Sequence: Synthetic polynucleotide"
gcctccctcgcgccatcagcgttactttgagacctccaggacagaggacgctgggcccagagaaaggaggcagaaggaaagccatcttacctgaagagacggtgaccattgtcccttggccccagatatcaaaaggtcgaccgttactttgagaccttcaacagtaatacacggctgtgtcctcggttttcaggctgttcatttgcagatacagcgtgttttttgaatcatctcttgagatggtgaatctgcctttcacgggtgcagcgtagtctgttgtcccaccatcagttttgcttttaatacggccaacccactccagccccttccctggagcctggcggacccagctcatccaggcgttactgaaagtgaatccagaggctgcacaggagagtctaagggaccccccaggctttaccaagcctcccccagactccaccagctgcacctcacactgcgttactttgagacctctgagcgggctggcaaggc

SEQ ID NO: 2072 - DNA, 495 bp, Artificial Sequence
  source: /note="Description of Artificial Sequence: Synthetic polynucleotide"
gcctccctcgcgccatcagcgttacttgaatggacccaggacagaggacgctgggcccagagaaaggaggcagaaggaaagccatcttacctgaagagacggtgaccattgtcccttggccccagatatcaaaaggtcgaccgttacttgaatggactcaacagtaatacacagccatgtcctcggctctccgtctgttcttttgcagatacagggagttcctggaattgtctctggagatgatgaatcggcgcttcacggagtccacatagtgcgtcctactgccattccaactaacacccgatacccactccagcccctttcctggagccttgcgggcccagttcatgtcactgttactgaaggtgaatccagaggctgcacaggagagtctcagggaccccccaggctgtaccaagcctcccccagactccaccagctgcacctcacactggacacccgttacttgaatggacctgagcgggctggcaaggc

SEQ ID NO: 2073 - DNA, 495 bp, Artificial Sequence
  source: /note="Description of Artificial Sequence: Synthetic polynucleotide"
gcctccctcgcgccatcagcgttacttcacatggaccaggacagaggacgctgggcccagagaaaggaggcagaaggaaagccatcttacctgaagagacggtgaccattgtcccttggccccagatatcaaaaggtcgaccgttacttcacatggatcaacagtgatacaaggccgtgtcctcggctctcagactgttcatttgcagatacagggagttcttggcgttgtctctggagatggtgaatcggcccttcacagagtctgcataacctgtgctaccaccattccaattaataccagagacccactccagccccttccctggagcttggcggacccagctcatgccataatcatcaaaggtgaatccagaggctgcacaggagagtctcagggaccccccaggccgtaccacacctcccccagactccaccagctgcacctcacactggacacccgttacttcacatggactgagcgggctggcaaggc

SEQ ID NO: 2074 - DNA, 495 bp, Artificial Sequence
  source: /note="Description of Artificial Sequence: Synthetic polynucleotide"
gcctccctcgcgccatcagcgttacttttgaccatccaggacagaggacgctgggcccagagaaaggaggcagaaggaaagccatcttacctgaagagacggtgaccattgtcccttggccccagatatcaaaaggtcgaccgttacttttgaccattcaacagtaatacacagccgtgtcctcggctctcaggctgttcatttgcagatacagtgagttcttggcgttgtctctggagatggtgaatcggcccttcactgagtctgcgtagtatatgtaactactactactactaatggatgagacccactccagccccttccctggagcctggcggacccagttcatgctatagctactgaaggtgaatccagaggctgcacaggagagtctcagggaccccccaggcttgaccaggcctcccccagactccaccagctgcacctcacactggacacccgttacttttgaccatctgagcgggctggcaaggc

SEQ ID NO: 2075 - DNA, 495 bp, Artificial Sequence
  source: /note="Description of Artificial Sequence: Synthetic polynucleotide"
gcctccctcgcgccatcagcgttacttaagccatcccaggacagaggacgctgggcccagagaaaggaggcagaaggaaagccatcttacctgaagagacggtgaccattgtcccttggccccagatatcaaaaggtcgaccgttacttaagccatctcaacagtaatatacggccgtgtcctcggctctcaggctgttcatttgcagatacagcgtgttcttggaattgtctctggagatggtgaaccggcccttcacggagtctgcgtagtatgtgctaccaccactaccactaatagctgagacccactccagccccttccctggagcctggcggacccagctcatggcatagctgctaaaggtgaatccagaggctgcacaggagagtctcagggaccccccaggctgtaccaagcctcccccagactccaacagctgcacctcacactggacacccgttacttaagccatcctgagcgggctggcaaggc

SEQ ID NO: 2076 - DNA, 495 bp, Artificial Sequence
  source: /note="Description of Artificial Sequence: Synthetic polynucleotide"
gcctccctcgcgccatcagcgttactttccatgtgccaggacagaggacgctgggcccagagaaaggaggcagaaggaaagccatcttacctgaagagacggtgaccattgtcccttggccccagatatcaaaaggtcgaccgttactttccatgtgtcaacagtaatacacagccgtgtcctcagctctcaggctgttcatttgcagatacagcgtgttcttggaattgtctctggagatggtgaatcggcccttcacggagtctgcatagtatttattacttccatcatatgatataactgccacccactccagccccttgcctggagcctggcggacccagtgcatgccatagctactgaaggtgaatccagaggctgcacaggagagtctcagggacctcccaggctggaccacgcctcccccagactccaccagctgcacctgacactggacacccgttactttccatgtgctgagcgggctggcaaggc

SEQ ID NO: 2077 - DNA, 495 bp, Artificial Sequence
  source: /note="Description of Artificial Sequence: Synthetic polynucleotide"
gcctccctcgcgccatcagcgttacttcaagtcacccaggacagaggacgctgggcccagagaaaggaggcagaaggaaagccatcttacctgaagagacggtgaccattgtcccttggccccagatatcaaaaggtcgaccgttacttcaagtcactcaacagtaatacacagccgtgtcctcagctctcaggctgttcatttgcagatacagcgtgttcttggaattgtctctggagatggtgaatcggcccttcacggagtctgcatagtatttattacttccatcatatgatataactgccacccactccagccccttgcctggagcctggcggacccagtgcatgccatagctactgaaggtgaatccagaggctgcacaggagagtctcagggacctcccaggctggaccacgcctcccccagactccaccagctgcacctgacactggacacccgttacttcaagtcacctgagcgggctggcaaggc

SEQ ID NO: 2078 - DNA, 495 bp, Artificial Sequence
  source: /note="Description of Artificial Sequence: Synthetic polynucleotide"
gcctccctcgcgccatcagcgttacttctgcaatcccaggacagaggacgctgggcccagagaaaggaggcagaaggaaagccatcttacctgaagagacggtgaccattgtcccttggccccagatatcaaaaggtcgaccgttacttctgcaatctcaacagtaatacacagccgtgtcctcggctctcaggctgttcatttgcagatacagcgtgttcttggaattgtctctggagatggtgaatcggcccttcacggagtctgcatagtatttattacttccatcataccatataactgccacccactccagccccttgcctggagcctggcggacccagtgcatgccatagctactgaaggtgaatccagacgctgcacaggagagtctcagggacctcccaggctggaccacgcctcccccagactccaccagctgcacctgacactggacacccgttacttctgcaatcctgagcgggctggcaaggc

SEQ ID NO: 2079 - DNA, 495 bp, Artificial Sequence
  source: /note="Description of Artificial Sequence: Synthetic polynucleotide"
gcctccctcgcgccatcagcgttacttatcgacgaccaggacagaggacgctgggcccagagaaaggaggcagaaggaaagccatcttacctgaagagacggtgaccattgtcccttggccccagatatcaaaaggtcgaccgttacttatcgacgatcaacagtaatacacagccgtgtcctcggccctcaggctattcgtttgcagatacagggtgttcctggaattgtctctggagatgatgaatcggcccttcacagagtctgcatagtgcgtcctactgccattccaactaacacccgatacccactccagcccctttcctggagcctgatggacccagttcatgtcactgttactgaaggtgaatccagaggctgcacaggagagtctcagggatcccccaggctgtaccaagcctcccccagactccaccagctgcacctcacactggacacccgttacttatcgacgactgagcgggctggcaaggc

SEQ ID NO: 2080 - DNA, 495 bp, Artificial Sequence
  source: /note="Description of Artificial Sequence: Synthetic polynucleotide"
gcctccctcgcgccatcagcgttacttacagactgccaggacagaggacgctgggcccagagaaaggaggcagaaggaaagccatcttacctgaagagacggtgaccattgtcccttggccccagatatcaaaaggtcgaccgttacttacagactgtcaacagtaatacacggccgtgccctcagctctcaggttgttcatttgaagatacagcgtgttcttggaattgtctctggagatggtgaatctgcccttcctggagtctgcgtagtatgtgctaccaccactaatggatgagacccactccagccccttccctggagcctggcggatccagctcatctcattgctactgacggtgaatccagaggctgcacaggagagtctcagggaccccctaggctgtaccaagcctcccccagactccaccagctgcacctcacactggacacctgcaaacgttacttacagactgctgagcgggctggcaaggc

SEQ ID NO: 2081 - DNA, 495 bp, Artificial Sequence
  source: /note="Description of Artificial Sequence: Synthetic polynucleotide"
gcctccctcgcgccatcagcgttacttccttatagccaggacagaggacgctgggcccagagaaaggaggcagaaggaaagccatcttacctgaagagacggtgaccattgtcccttggccccagatatcaaaaggtcgaccgttacttccttatagtcatgcacagtaatacaaggcggtgtcctcagttctcagactgttcatttgcagatacagggagtttttgctgttgtctctggagatggtgaatcggcccttcacagagtctgcatagtatgtgctaccaccatcccaactaataagagagacccactccagacccttccccggagcttgacggacccagtgcatggtataatcatcaaaggtgaatccagaggctgcacaggagagtctcagggaccccccaggctgtaccacgactcccccagactccaccagctgcacttcacactggaccgttacttccttatagctgagcgggctggcaaggc

SEQ ID NO: 2082 - DNA, 495 bp, Artificial Sequence
  source: /note="Description of Artificial Sequence: Synthetic polynucleotide"
gcctccctcgcgccatcagcgttactttacgcgttccaggacagaggacgctgggcccagagaaaggaggcagaaggaaagccatcttacctgaagagacggtgaccattgtcccttggccccagatatcaaaaggtcgaccgttactttacgcgtttcaacagtaatacacagccgtgtcctcgtctctcaggctgttcatttgcagatacagtgagttcttggcattgtctctggagatggtgaatcggcccttcacagagtctgcgtagtatatggtactactactactactaatgtatgaaacccactccagccccttccctggagcctggcggacccagttcatgctatagctactgaaggtgaatccagaggctgcacaggagagtctcagggaccccccaggctgtaccaagcctcccccagactccaccagctgcacctcacactggacacccgttactttacgcgttctgagcgggctggcaaggc

SEQ ID NO: 2083 - DNA, 495 bp, Artificial Sequence
  source: /note="Description of Artificial Sequence: Synthetic polynucleotide"
gcctccctcgcgccatcagcgttacttctataaggccaggacagaggacgctgggcccagagaaaggaggcagaaggaaagccatcttacctgaagagacggtgaccattgtcccttggccccagatatcaaaaggtcgaccgttacttctataaggtcaacagtaatacacggctgtgtcctcggttttcaggctgttcatttgcagataggcgatgcttttggaatcatctcttgagatggtgaatctgcctttcacagacgcggcgtattctgttgtcccaccataagctttgcttctaatgaaacctacccactccagccccttccctggagcctggcggaaccagctcatagcataatcaccaaaggtgaatccagaagctgtacaggagagtctcagggaccgccctggctgtaccaagcctcccccagactccaccagctgcacctcacattgcgttacttctataaggctgagcgggctggcaaggc

SEQ ID NO: 2084 - DNA, 495 bp, Artificial Sequence
  source: /note="Description of Artificial Sequence: Synthetic polynucleotide"
gcctccctcgcgccatcagcgttactttcttagtcccaggacagaggacgctgggcccagagaaaggaggcagaaggaaagccatcttacctgaagagacggtgaccattgtcccttggccccagatatcaaaaggtcgaccgttactttcttagtctcaacagtaatacacggccgtgtcctcggctctcaggctgttcatttgaagatacagcgtgttcttggaattgtctctggagatggtgaatcggcccttcacggagtctgcgtagtatgtgctaccaccgctataaataactgagacccactccagccccttccctggagcctggcggacccagctcatgtagttgctactgacggtgaacccagaggctgcacaggagagtctcagggaccccccaggctggatcaagcctcctccagactccaccagctgcacctcacactggacacctgccgttactttcttagtcctgagcgggctggcaaggc

SEQ ID NO: 2085 - DNA, 495 bp, Artificial Sequence
  source: /note="Description of Artificial Sequence: Synthetic polynucleotide"
gcctccctcgcgccatcagcgttactttgtctgcaccaggacagaggacgctgggcccagagaaaggaggcagaaggaaagccatcttacctgaagagacggtgaccattgtcccttggccccagatatcaaaaggtcgaccgttactttgtctgcatcaacagtaatacacagccatgtcctcagctctcaggctgcccatttgaagatacagcgtgttcttggaattgtctctggagatggtgaatctgcccttcacagagtctgcataatatgtgctacccccattactactaatagctgaaacatattccagtcccttccctggagcctggcggacccagtgcatagcatagctactgaaggtgaatccagaggctgcacaggagagtctcagggaccccccaggctggaccaagccttccccagactccaccagctgcacctcacactggacacccgttactttgtctgcactgagcgggctggcaaggc

SEQ ID NO: 2086 - DNA, 495 bp, Artificial Sequence
  source: /note="Description of Artificial Sequence: Synthetic polynucleotide"
gcctccctcgcgccatcagcgttacttgccattaaccaggacagaggacgctgggcccagagaaaggaggcagaaggaaagccatcttacctgaagagacggtgaccattgtcccttggccccagatatcaaaaggtcgaccgttacttgccattaatcaacagtaatacacagccgtgtcctcagctctcaggctgttcatttgaagatacagcgtgttcttggaattgtctctggagatggtgaatcggcccttcacggagtctgcgtagtatgtgctaccacagctataaataactgagacccactccagccccttccctggagcctggcggacccagctcatgtagttgctactgacggtgaacccagaggctgcacaggagagtctcagggaccccccaggctggatcaagcctcctccagactccaccagctgcacctcacactggacacctgccgttacttgccattaactgagcgggctggcaaggc

SEQ ID NO: 2087 - DNA, 495 bp, Artificial Sequence
  source: /note="Description of Artificial Sequence: Synthetic polynucleotide"
gcctccctcgcgccatcagcgttacttgactaagaccaggacagaggacgctgggcccagagaaaggaggcagaaggaaagccatcttacctgaagagacggtgaccattgtcccttggccccagatatcaaaaggtcgaccgttacttgactaagatcaacagtaatacacggccgtgtcctcggttttcaggctgttcatttgcagatacagtgagttctttgaatcatctcttgagatggtgaatctgcctttcacagacgcggcgtattctgtggtgtaactgttagctttgtttctagtacggccaacccactccagccccttccctggagcctggcggacccagtccatgtagtggtcactgaaggtgaatccagaggctgcacaggagagtctcagggaccctccaggctggaccaagcctcccccagactccaccagctgcacctcacactgcgttacttgactaagactgagcgggctggcaaggc

SEQ ID NO: 2088 - DNA, 495 bp, Artificial Sequence
  source: /note="Description of Artificial Sequence: Synthetic polynucleotide"
gcctccctcgcgccatcagcgttacttaggttgctccaggacagaggacgctgggcccagagaaaggaggcagaaggaaagccatcttacctgaagagacggtgaccattgtcccttggccccagatatcaaaaggtcgaccgttacttaggttgcttcaacagtaatacacggccgtgtcctcggttttcaggctgttcatttgcagatacgccgtgttctttgaatcatctctggagatggtgaacctgcctttcaccgacgcagcatatgctgtcgcgtaactgttagctttgcttctaatacggccaacccactccagccctttcccggaagcctggcggacccagtgcatagcagagccactgaaggtgaacccagaggctgcacaggagagtttcagggaccccccaggctggaccaagcctcccccggactccaccagctgcacctcacactgcgttacttaggttgctctgagcgggctggcaaggc

SEQ ID NO: 2089 - DNA, 495 bp, Artificial Sequence
  source: /note="Description of Artificial Sequence: Synthetic polynucleotide"
gcctccctcgcgccatcagcgttacttctcgagaaccaggacagaggacgctgggcccagagaaaggaggcagaaggaaagccatcttacctgaagagacggtgaccattgtcccttggccccagatatcaaaaggtcgaccgttacttctcgagaatcaacagtaatacacagccgtgtcctcggctctcagactgttcatttgcagatacagcgtgttcttggcgttgtctctggagatggtgaatcggcccttcacggagtccgcgtagcttgtgctactcccatcactattaatacgtgagacccacaccagccccttccctggagcttggcggacccagtgcatccagtagctactgaaggtgaatccagaggctgcacaggagagtctcagggaccccccaggctgaactaagcctcccccggactccaccagctgcacctcacactggacacccgttacttctcgagaactgagcgggctggcaaggc

SEQ ID NO: 2090 - DNA, 495 bp, Artificial Sequence
  source: /note="Description of Artificial Sequence: Synthetic polynucleotide"
gcctccctcgcgccatcagcgttacttttaatggcccaggacagaggacgctgggcccagagaaaggaggcagaaggaaagccatcttacctgaagagacggtgaccattgtcccttggccccagatatcaaaaggtcgaccgttacttttaatggctcaacagtaatacacagccgtgtcctcagctctcaggctgttcatttgcagatacagcgtgttcttggaattgtctctggagatggtgaatcggcccttcacggagtctgcatagtatttattacttccatcataccgtataaatgccacccactccagccccttgcctggagcctggcggacccagtgcatgccatagctactgaaggtgaatccagacgctgcacaggagagtctcagggaccccccaggctggaccacgcctcccccagactccaccagctgcacctgacactggacacccgttacttttaatggcctgagcgggctggcaaggc

SEQ ID NO: 2091 - DNA, 495 bp, Artificial Sequence
  source: /note="Description of Artificial Sequence: Synthetic polynucleotide"
gcctccctcgcgccatcagcgttactttgcagacaccaggacagaggacgctgggcccagagaaaggaggcagaaggaaagccatcttacctgaagagacggtgaccattgtcccttggccccagatatcaaaaggtcgaccgttactttgcagacatcaacagtaatacacagccgtgtcctcagctctcaggctgttcatttgaagatgcagcgtgttcttggaattgtctctggagatggtgaatctgcccttcctggagtctgcgtagtatgtgctaccaccactaatggatgagacccactccagacccttccctggagcctggcggacccagctcatctcattgctactgacggtgaatccagaggctgcacaggagagtctcagggaccccccaggctgtaccaagactccccgagactccaccagctgcacctcacactggacacctgcaaacgttactttgcagacactgagcgggctggcaaggc

SEQ ID NO: 2092 - DNA, 495 bp, Artificial Sequence
  source: /note="Description of Artificial Sequence: Synthetic polynucleotide"
gcctccctcgcgccatcagcgttactttcactgagccaggacagaggacgctgggcccagagaaaggaggcagaaggaaagccatcttacctgaagagacggtgaccattgtcccttggccccagatatcaaaaggtcgaccgttactttcactgagtcaacagtaatacacggccgtgtccgcggcggtcacagagctcagcttcagggagaactggttcttggacgtgtctactgacatggtgactcgactcttgagggaggggttgtagttggtgctcccactggtatagatacgcccaatccactccagtcccttcccggcgggctgccggatccagctccagtagtaactactgatggagccaccagagacagtgcaggtgagggacagggtctccgaaggcttcaccagtcctgggcccgactcctgcagctgcacctgggacaggacccctgtcgttactttcactgagctgagcgggctggcaaggc

SEQ ID NO: 2093 - DNA, 495 bp, Artificial Sequence
  source: /note="Description of Artificial Sequence: Synthetic polynucleotide"
gcctccctcgcgccatcagcgttacttgagtacgtccaggacagaggacgctgggcccagagaaaggaggcagaaggaaagccatcttacctgaagagacggtgaccattgtcccttggccccagatatcaaaaggtcgaccgttacttgagtacgttcaacagtaatacacggccgtgtccacggcggtcacagagctcagcttcagggagaactggttcttggacgtgtctactgacatggtgactcgactcttgagggacgggttgtagtaggtgctcccactataatagatgtacccaatccactccagtcccttccctgggggctgccggatccagccccaccagttactactgctgatggagtaaccagagacagcgcaggtgagggacagggtgtccgaaggcttcaccagtcctgggcccgactcctgcagctgcacctgggacaggaccaccgttacttgagtacgtctgagcgggctggcaaggc

SEQ ID NO: 2094 - DNA, 495 bp, Artificial Sequence
  source: /note="Description of Artificial Sequence: Synthetic polynucleotide"
gcctccctcgcgccatcagcgttacttatacgccaccaggacagaggacgctgggcccagagaaaggaggcagaaggaaagccatcttacctgaagagacggtgaccattgtcccttggccccagatatcaaaaggtcgaccgttacttatacgccatcaacagtaatacacggccgtgtccgcggcggtcacagagctcagcttcagggagaactggttcttggacctgtctactgatatggtgactcgactcttgagggacgggttgtagtaggtgctcccactatgatagatgtacccaatccactccaggcccttccctggtggctgccggatccagctccaggagtaaccaccactgctgatggagccaccagagacagcgcaggtgagggacagggtctgtgaaggcttcaccagtcctgagccggactcctgcagctgcagctgggacaggaccgttacttatacgccactgagcgggctggcaaggc

SEQ ID NO: 2095 - DNA, 495 bp, Artificial Sequence
  source: /note="Description of Artificial Sequence: Synthetic polynucleotide"
gcctccctcgcgccatcagcgttactttcgcatcaccaggacagaggacgctgggcccagagaaaggaggcagaaggaaagccatcttacctgaagagacggtgaccattgtcccttggccccagatatcaaaaggtcgaccgttactttcgcatcatcaacagtaatacacggccgtgtctgcggcagtcacagagctcagcttcagggagaactggttcttggacgtgtctactgatatggtaactcgactcttgagggacgggttgtagtaggtgctcccactgtaatagatgtacccaatccactccaggcccttccctgggggctggcggatccaactccagtagtaatcaccactgctgatggagccaccagagacagtgcaggtgagggacagggtctgtgaaggcttcaccagtcctgggcccgactcctgcagctgcacctgggacaggaccgttactttcgcatcactgagcgggctggcaaggc

SEQ ID NO: 2096 - DNA, 495 bp, Artificial Sequence
  source: /note="Description of Artificial Sequence: Synthetic polynucleotide"
gcctccctcgcgccatcagcgttacttcgcttaatccaggacagaggacgctgggcccagagaaaggaggcagaaggaaagccatcttacctgaagagacggtgaccattgtcccttggccccagatatcaaaaggtcgaccgttacttcgcttaattcaacagtaatacacggccgtgtccgcggcagtcacagagctcagcttcagggagaactggttcttagacgtgtctactgatatggtaactcgactcttgagggacgggttgtagtaggtgctcccactgtaatagatgtacccaatccactccaggcccttccctgggtgctggcggatccagctccagtagtaaccaccactgctgatggagccaccagagacagtacaggtgagggacagggtctgtgaaggcttcaccagtcctgggcccgactcctgcagctgcacctggggcaggaccgttacttcgcttaatctgagcgggctggcaaggc

SEQ ID NO: 2097 - DNA, 495 bp, Artificial Sequence
  source: /note="Description of Artificial Sequence: Synthetic polynucleotide"
gcctccctcgcgccatcagcgttactttggttatcccaggacagaggacgctgggcccagagaaaggaggcagaaggaaagccatcttacctgaagagacggtgaccattgtcccttggccccagatatcaaaaggtcgaccgttactttggttatctcaacagtaatacacagccgtgtccgcggcggtcacagagctcagcttcagggagaactggttcttggacgtgtctactgatatggtgactcgactcttgagggacgggttgtagttggtgcttccactatgattgatttccccaatccactccagccccttccctgggggctggcggatccagctccagtagtaaccactgaaggacccaccatagacagcgcaggtgagggacagggtctccgaaggcttcaacagtcctgcgccccactgctgtagctgcacctgggacaggacccctgtcgttactttggttatcctgagcgggctggcaaggc

SEQ ID NO: 2098 - DNA, 495 bp, Artificial Sequence
  source: /note="Description of Artificial Sequence: Synthetic polynucleotide"
gcctccctcgcgccatcagcgttacttggattgctccaggacagaggacgctgggcccagagaaaggaggcagaaggaaagccatcttacctgaagagacggtgaccattgtcccttggccccagatatcaaaaggtcgaccgttacttggattgcttcaacagtaatacacagccgtgtctgcggcggtcacagagctcagcttcagggagaactggttcttggacgtgtctacggatatggtgactcgactcttgagggacgggttgtagtaggtgctcccactataatagatactcccaatccactccagccccttccctgggggctggcggatccagccccagtagtaactactactgctgatggagccaccagagacagtgcaggtgagggacagggtctccgaaggcttcaccagtcctgggcccgactcctgcagctgcagctgggacaggaccgttacttggattgctctgagcgggctggcaaggc

SEQ ID NO: 2099 - DNA, 495 bp, Artificial Sequence
  source: /note="Description of Artificial Sequence: Synthetic polynucleotide"
gcctccctcgcgccatcagcgttacttctcagtgaccaggacagaggacgctgggcccagagaaaggaggcagaaggaaagccatcttacctgaagagacggtgaccattgtcccttggccccagatatcaaaaggtcgaccgttacttctcagtgatcaacagtaatacacggccgtgtccgcagcggtcacagagctcagcttcagggagaactggttcttggacgtgtctactgatatggtgactcgactcttgagggaggggttgtagttggtgctcccactgtaatagatatacccaatccactccagtcccttccctgggggctgccggatccagctccagtagtaactactgatggagccaccagagacagtgcaggtgagggacagggtctccgaaggcttcaccagtcctgggcccgactcctgcagctgcacctgggacaggacccctgtcgttacttctcagtgactgagcgggctggcaaggc

SEQ ID NO: 2100 - DNA, 495 bp, Artificial Sequence
  source: /note="Description of Artificial Sequence: Synthetic polynucleotide"
gcctccctcgcgccatcagcgttacttacgtactcccaggacagaggacgctgggcccagagaaaggaggcagaaggaaagccatcttacctgaagagacggtgaccattgtcccttggccccagatatcaaaaggtcgaccgttacttacgtactctcaacagtaatacacggccgtgtccgcagcggtcacagagctcagcttcagggagaactggttcttggacgtgtctactgatatggtgactcgactcttgagggaggggttgtagttggtgctcccactgtaatagatatacccaatccactccagtcccttccctgggggctgccggatccagctccagtagtaaccaccactgctgacggagccaccagagacagtgcaggtgagggacagggtctccgaaggcttcaccagtcctgggcccgactcctgcagctgcacctgggacaggaccgttacttacgtactcctgagcgggctggcaaggc

SEQ ID NO: 2101 - DNA, 495 bp, Artificial Sequence
  source: /note="Description of Artificial Sequence: Synthetic polynucleotide"
gcctccctcgcgccatcagcgttactttgatgcgaccaggacagaggacgctgggcccagagaaaggaggcagaaggaaagccatcttacctgaagagacggtgaccattgtcccttggccccagatatcaaaaggtcgaccgttactttgatgcgatcaacagtaatacacggccgtgtctgcggcggtcacagagctcagcttcagggagaactggttcttggacgtgtctactgatatggtgactcgactcttgagggacgggttgtagtaggtgctcccactatgatagatactcccaatccactccagccccttccctgggggctgccggatccagccccagtagtaaccactgctgatggagtaaccagagacagcgcaggtgagggacagggtctccgaaggcttcaccagtcctgggcccgactcctgcagctgcacctgggacaggacccccgttactttgatgcgactgagcgggctggcaaggc

SEQ ID NO: 2102 - DNA, 495 bp, Artificial Sequence
  source: /note="Description of Artificial Sequence: Synthetic polynucleotide"
gcctccctcgcgccatcagcgttacttattaagcgccaggacagaggacgctgggcccagagaaaggaggcagaaggaaagccatcttacctgaagagacggtgaccattgtcccttggccccagatatcaaaaggtcgaccgttacttattaagcgtcaacagtaatacatggcggtgtccgaggccttcaggctgctccactgcaggtaggcggtgctgatggacttgtcggctgagatggtgacctggccttggaaggacgggctgtatctggtatcagagtcaccaggatagatgatccccatccactccaggcctttcccgggcatctggcgcacccagccgatccagtagctggtaaagctgtatccagaacccttacaggagatcttcagagactccccgggctttttcacctctgctccagactgcaccagctgcacctcggcacagactcccgttacttattaagcgctgagcgggctggcaaggc

SEQ ID NO: 2103 - DNA, 495 bp, Artificial Sequence
  source: /note="Description of Artificial Sequence: Synthetic polynucleotide"
gcctccctcgcgccatcagcgttacttagcaatccccaggacagaggacgctgggcccagagaaaggaggcagaaggaaagccatcttacctgaagagacggtgaccattgtcccttggccccagatatcaaaaggtcgaccgttacttagcaatcctcaacagtaatacatggcggtgtccgaggccttcaggctgctccactgcaggtaggcagtgctgatggacttgtcagctgagatggtgacgtggccttggaaggacgggctgtagttggtataagagtcactaggatcaatcctccccatccactccaagcctttcccgggcatctggcgcacccagctgatccagtagctggtaaagctgtatccagaacccttacaggagatcctcagagactccccgggctttttcacctctgctccagactgcaccagctgcacttcggcacagactcccgttacttagcaatccctgagcgggctggcaaggc

SEQ ID NO: 2104 - DNA, 495 bp, Artificial Sequence
  source: /note="Description of Artificial Sequence: Synthetic polynucleotide"
gcctccctcgcgccatcagcgttacttgcttagtaccaggacagaggacgctgggcccagagaaaggaggcagaaggaaagccatcttacctgaagagacggtgaccattgtcccttggccccagatatcaaaaggtcgaccgttacttgcttagtatcaacagtaatacacagccgtgtcctcgggagtcacagagttcagctgcagggagaactggttcttggatgtgtctgggttgatggttattcgacttttcacagatactgcataatcattataccacttggacctgtagtatgtccttcccagccactcaaggcctctcgatggggactgcctgatccagttccaagcagcactgttgctagagacactgtccccggagatggcacaggtgagtgagagggtctgcgagggcttcaccagtcctggacctgactgctgcagctgtacctgtgacgttacttgcttagtactgagcgggctggcaaggc

SEQ ID NO: 2105 - DNA, 495 bp, Artificial Sequence
  source: /note="Description of Artificial Sequence: Synthetic polynucleotide"
gcctccctcgcgccatcagcgttactttgaccttgccaggacagaggacgctgggcccagagaaaggaggcagaaggaaagccatcttacctgaagagacggtgaccattgtcccttggccccagatatcaaaaggtcgaccgttactttgaccttgtcaacagtaatacacggcagtgtcctcagcctttaggctgcagatctgcagatatgccgtgctgacagaggtgtccaaggagaagacaaaccgtcctgtgaagccctgggcatacgttgggttcccagtgttggtgttgatccatcccatccactcaagcccttgtccaggggcctgtcgcacccaattcatagcatagctagtgaaggtgtatccagaagccttgcaggaaaccttcactgaggccccaggcttcttcaactcagacccagattgcaccagctgcacctgggagtgggcacccgttactttgaccttgctgagcgggctggcaaggc

SEQ ID NO: 2106 - DNA, 495 bp, Artificial Sequence
  source: /note="Description of Artificial Sequence: Synthetic polynucleotide"
gcctccctcgcgccatcagcgttacttcaaggtcaccaggacagaggacgctgggcccagagaaaggaggcagaaggaaagccatcttacctgaagagacggtgaccattgtcccttggccccagatatcaaaaggtcgaccgttacttcaaggtcatcaacagtaatacatggccatgtcctcagcctttaggctgctgatctgcaggtatgctgtgctggcagaggtgtccatggagaagacaaaccgtcctgtgaagccctgggcatatgttgggttcccagtgtaggtgttgaaccatcccatccactcaagcccttgtccaggggcctgtggcacccaattcataccataggtggtgaaactgtaaccagaagccttgcaggagaccttcactgaggccccaggctgcttcacctcatggccagactgcaccagctgcacctgggagtaggtacccgttacttcaaggtcactgagcgggctggcaaggc

SEQ ID NO: 2107 - DNA, 495 bp, Artificial Sequence
  source: /note="Description of Artificial Sequence: Synthetic polynucleotide"
gcctccctcgcgccatcagcgttacttcactgtacccaggacagaggacgctgggcccagagaaaggaggcagaaggaaagccatcttacctgaagagacggtgaccattgtcccttggccccagatatcaaaaggtcgaccgttacttcactgtactcagggaatgtgcggccctgcccttggccatcacggagctcagctgcagggataactgggccttggatgtgtctctacagatggagagttggcccagaaaggctgggctgaagtgtgtgctgcccctggagctgaggtgccccagcgccttcccagagggctgctgggtccaggcccagaggtctgtgaggacctcaccagccctgggcatgactccagtagctgcatctgatgcaggacactcagggacaagaagcaaagagatgagtcacaagcggacaccacagcccacagcccccgttccgttacttcactgtacctgagcgggctggcaaggc

SEQ ID NO: 2108 - DNA, 495 bp, Artificial Sequence
  source: /note="Description of Artificial Sequence: Synthetic polynucleotide"
gcctccctcgcgccatcagcgttacttgatgatccccaggacagaggacgctgggcccagagaaaggaggcagaaggaaagccatcttacctgaagagacggtgaccattgtcccttggccccagatatcaaaaggtcgaccgttacttgatgatcctcagtataaaaatccatggtggtttactcattgtgcgggtagctcagctgtaggaaaaactgttttctgaatgtggatctggaggtggtgactggactcttgagaagcgggttgcactgtgtgtttcctcgtgacctacacacctgacccacttcagcttcttccctgggggctggcagatacagctccaggaggaagtactggttatgattggaaatccagagacagcacaggtgaaggagagggtctctgagggctttactagaacatgagtgcactgaaaaacacaatttttttcataggcgttacttgatgatccctgagcgggctggcaaggc

SEQ ID NO: 2109 - DNA, 495 bp, Artificial Sequence
  source: /note="Description of Artificial Sequence: Synthetic polynucleotide"
gcctccctcgcgccatcagcgttacttcgccaataccaggacagaggacgctgggcccagagaaaggaggcagaaggaaagccatcttacctgaagagacggtgaccattgtcccttggccccagatatcaaaaggtcgaccgttacttcgccaatatcaataaaaatcatggttgtgtactccttgttaaggtagctcagctgtaggagaaactgttttttggatgtggatctggagatggtgactggactcttgaggagtgggttggattgtgcactccctcatgacctgtgcacctgattcgctccagtcccttccccggggggtgacggatccagctccagcaggaagcactggttgtaatggagaagcagagatgccacaggccagggggaggatctgtgagggcttcaccaggccaggagtgcaccgagaatcacagttgtcggcatgcacaggcgttacttcgccaatactgagcgggctggcaaggc

SEQ ID NO: 2110 - DNA, 495 bp, Artificial Sequence
  source: /note="Description of Artificial Sequence: Synthetic polynucleotide"
gcctccctcgcgccatcagcgttactttcaagcctccaggacagaggacgctgggcccagagaaaggaggcagaaggaaagccatcttacctgaagagacggtgaccattgtcccttggccccagatatcaaaaggtcgaccgttactttcaagccttcacagtaatactcagccgtgtcctaggtggtcatggagctgagcttcacagagaactggctcttggttgagtcactgttgatggggacatggacctgggtggagggtgcatgatgtgtattccttgatgatccagtctagtaactgtgccccagccattccagcctgttgcccacgggatggtggattcatctcaaataatatccatggtaaaaaaaagaatccagacacagcacaggcagagggcagtgtctgagggcctcatgggtcctggacctgactcctgcagctgcacctgggacacgttactttcaagcctctgagcgggctggcaaggc

SEQ ID NO: 2111 - DNA, 495 bp, Artificial Sequence
  source: /note="Description of Artificial Sequence: Synthetic polynucleotide"
gcctccctcgcgccatcagcgttacttacgtgtgtccaggacagaggacgctgggcccagagaaaggaggcagaaggaaagccatcttacctgaagagacggtgaccattgtcccttggccccagatatcaaaaggtcgaccgttacttacgtgtgttcacttaaaaatgcgtagttgtgtgttcactgggcacagagctcagctgtaagaactgtttcttggatctggatatggactcttgagcagtgggttgtaatttgtgctcccttcacaacccatgcacctgatccactcctgtccatcttctaggggcaagcagatacaattctagcaggaaacactggttatgatggggaatccagagacagtgcaggtgaggagagggtctgcaaggagtctcaagccagaagtgtgctgagaaacatagttgttgatgttaacaggttctgggcaacacagcgttacttacgtgtgtctgagcgggctggcaaggc

SEQ ID NO: 2112 - DNA, 495 bp, Artificial Sequence
  source: /note="Description of Artificial Sequence: Synthetic polynucleotide"
gcctccctcgcgccatcagcgttactttccgtctaccaggacagaggacgctgggcccagagaaaggaggcagaaggaaagccatcttacctgaagagacggtgaccattgtcccttggccccagatatcaaaaggtcgaccgttactttccgtctatcagctctaaaatacatggctatgtgtttgttcctcacatagttcagctgtaagaagaactactttttggacatggatctggagatggtgactggactcttgagaagaggggagtaatttgtgctccctccatgacctatgcacccgatccactccagtacctcccatgggggcgctgatggatgcagctccagcaggaaacactggttgtgatggagaatgcagagatggcacaggtgagggagaggttctgtgaaggcttcaccaggccaagagtgcaccgagaaatacagttgttggcagcgttactttccgtctactgagcgggctggcaaggc

SEQ ID NO: 2113 - DNA, 495 bp, Artificial Sequence
  source: /note="Description of Artificial Sequence: Synthetic polynucleotide"
gcctccctcgcgccatcagcgttacttaagagctgccaggacagaggacgctgggcccagagaaaggaggcagaaggaaagccatcttacctgaagagacggtgaccattgtcccttggccccagatatcaaaaggtcgaccgttacttaagagctgtcattcaaaatgtgtagttgtgtgttcactgggcacagagctcagctgtaagaactgtttcttggatctggatatggactcttgagaagtgggatgtaatttttgctccctttacaacccatgaacctgatccactcctgtccatcttctaggggcaagcagatacaattctagcaggacacactggttatgatggggaatccagagacagtgcaggtgagggagagggtctgtgaggatgtctcaagccagaagtgcactggaaaacacagttgttgatgttaacagtttctggacaacacgcgttacttaagagctgctgagcgggctggcaaggc

SEQ ID NO: 2114 - DNA, 495 bp, Artificial Sequence
  source: /note="Description of Artificial Sequence: Synthetic polynucleotide"
gcctccctcgcgccatcagcgttactttatcgctcccaggacagaggacgctgggcccagagaaaggaggcagaaggaaagccatcttacctgaagagacggtgaccattgtcccttggccccagatatcaaaaggtcgaccgttactttatcgctctcagctctaaaatacatggctatgtgtttgttgctcacatagttcacctgtaagaagaagtactttttggacatggatctggagatggtgactggactcttgagaagaggggagtaatctgtgctccctccatgacctatgcacccgatccactccagtacctcccatgggggcgctgatggatgcagctccagaaggaaacactggttgtgatggagaatgcagagatggcacaggtgagggagaggttctgtgaaggcttcaccaggccaagagtgcaccgagaaatacagttgttggcagcgttactttatcgctcctgagcgggctggcaaggc

SEQ ID NO: 2115 - DNA, 495 bp, Artificial Sequence
  source: /note="Description of Artificial Sequence: Synthetic polynucleotide"
gcctccctcgcgccatcagcgttactttcagatgcccaggacagaggacgctgggcccagagaaaggaggcagaaggaaagccatcttacctgaagagacggtgaccattgtcccttggccccagatatcaaaaggtcgaccgttactttcagatgctcatgaaagaagaattcatgtgcagacacatctgcttgtctgaagatatagtgcatgtgggaacatgtgggcttgtctgaattcatgataagtgggctggaattcatcctccactcatcacgtatgcacctgacccactcctgtgctttccatccagtgcctacaggaagcactgattgtgacagagaatccagaggcagcacaggtgagtgagggggtttgcaagggcttcaccaggctgataattgactgagaaaaacagttgttagcatgcacaagttctggatgatacattggaaaccccgttactttcagatgcctgagcgggctggcaaggc

SEQ ID NO: 2116 - DNA, 495 bp, Artificial Sequence
  source: /note="Description of Artificial Sequence: Synthetic polynucleotide"
gcctccctcgcgccatcagcgttacttgtgtagcaccaggacagaggacgctgggcccagagaaaggaggcagaaggaaagccatcttacctgaagagacggtgaccattgtcccttggccccagatatcaaaaggtcgaccgttacttgtgtagcatcaacagtaatacaaaccatgtcctcagatgtcacagagctcaggtatagtcaaaattgtttcttggatgaatctctggagaaggagagttggctctgcagagatggatcatcgtgtgtgtcacccttgcaatgtgttcctgacagcccatggaagcgggctagtggattcagctccagcagtaactgttggttgggatggacaacccagaaatggggcatgtgaggaagagaaaatgaaagtggatagcctgttaccgaaaactgctggactaagacacttgtaagcctgtcaatctcagtgcgttacttgtgtagcactgagcgggctggcaaggc

SEQ ID NO: 2117 - DNA, 495 bp, Artificial Sequence
  source: /note="Description of Artificial Sequence: Synthetic polynucleotide"
gcctccctcgcgccatcagcgttactttggcagttccaggacagaggacgctgggcccagagaaaggaggcagaaggaaagccatcttacctgaagagacggtgaccattgtcccttggccccagatatcaaaaggtcgaccgttactttggcagtttcacagccaagatatggaaactaagtgtctgtcaatgggcaaatggataaagacaatgtggtatgtgtacacaacatagcattattatgccttataaaataaggaaatgctgccattttccacaagacaaatggactcccaccaccactagcaatggattttatccattgcagcccctccctgagagccggcagatccaggtccactagtaaggactggttgtgacggagtggccagtaacagtgtaggtgaggcagagggtaagtgtgtgctattcaggtccagggctgactcctgcagctgcgttactttggcagttctgagcgggctggcaaggc

SEQ ID NO: 2118 - DNA, 495 bp, Artificial Sequence
  source: /note="Description of Artificial Sequence: Synthetic polynucleotide"
gcctccctcgcgccatcagcgttacttcagtccaaccaggacagaggacgctgggcccagagaaaggaggcagaaggaaagccatcttacctgaagagacggtgaccattgtcccttggccccagatatcaaaaggtcgaccgttacttcagtccaatcagtgtaaaaattcatggttgtgtactcgttgctcaggtagctcagctgtagaagaaactgtgttttggatgtggatctggagatggtgactggactcttgaggcgtgggttgcgttgtgttctccctcatgacctgtgcacctgattcactccagtcccttccctggggagctgagggatccagctccagcaggaagcactggttgtgatggagaagcagagacagcacagatgagggagagggtctgtgagggcttcgccaggccaagaacgcacgagaaatacagatgtcggcatgcaccgttacttcagtccaactgagcgggctggcaaggc

SEQ ID NO: 2119 - DNA, 495 bp, Artificial Sequence
  source: /note="Description of Artificial Sequence: Synthetic polynucleotide"
gcctccctcgcgccatcagcgttacttgtgtctacccaggacagaggacgctgggcccagagaaaggaggcagaaggaaagccatcttacctgaagagacggtgaccattgtcccttggccccagatatcaaaaggtcgaccgttacttgtgtctactcaagtaatacaaggttgtggcattgttggtcacagaactcagctaaaagaaaatttggttcttggacgtggatctggagatggtgactgagctcatgaggagtgggttagaatttgtgctccctcgtgacctatgccctgatccactcccttgactgaggactggcggatccagctccagcaggaagcactagttgtgatggagaatccagagacagcacaggtgagggagggggtctgtgagggcctcaccaggccaataaatgaccatgaaacacagtggttggtgtgcatggcttctggcgttacttgtgtctacctgagcgggctggcaaggc

SEQ ID NO: 2120 - DNA, 495 bp, Artificial Sequence
  source: /note="Description of Artificial Sequence: Synthetic polynucleotide"
gcctccctcgcgccatcagcgttacttgtacagtgccaggacagaggacgctgggcccagagaaaggaggcagaaggaaagccatcttacctgaagagacggtgaccattgtcccttggccccagatatcaaaaggtcgaccgttacttgtacagtgtcataaaaatacatggctgtgtgcttgtgactcacttagctcggctgtaggaagaactgctttttggacatggatctggagatggtgactggactcttgaggagtgggttggaatgtgcactccctcatgacctgtgcactggattcactccagtcccttcctggggggtttatgaatgcagctacagcaggaagcactggttgtgatggggaatccagagacagcacaggtgagggagagggtctgtgagggcttcaccaggccaagtgggcactgagaaacacagttgttggcatgcacagcgttacttgtacagtgctgagcgggctggcaaggc

SEQ ID NO: 2121 - DNA, 495 bp, Artificial Sequence
  source: /note="Description of Artificial Sequence: Synthetic polynucleotide"
gcctccctcgcgccatcagcgttacttggatcatcccaggacagaggacgctgggcccagagaaaggaggcagaaggaaagccatcttacctgaagagacggtgaccattgtcccttggccccagatatcaaaaggtcgaccgttacttggatcatctcatttaaaacatggctgtgagcttgttgctcacatagctccactgtaaaaacaagtgttttttggacccgaatttggagatggtgactggattcataaggagtgggtgggaatttttgctcccttcatgacgtgtgcgcctggtccactccagtccttcccatgtggactcgtggatccagctccagcaggaaacactggttgtgatggaaaatccagagacagcacaggtgagggagagggtctgcgagggctccaccaggccaagagtgcactaagaaacacagttgtttgtgagcacagcgttacttggatcatcctgagcgggctggcaaggc

SEQ ID NO: 2122 - DNA, 495 bp, Artificial Sequence
  source: /note="Description of Artificial Sequence: Synthetic polynucleotide"
gcctccctcgcgccatcagcgttactttattggcgccaggacagaggacgctgggcccagagaaaggaggcagaaggaaagccatcttacctgaagagacggtgaccattgtcccttggccccagatatcaaaaggtcgaccgttactttattggcgtcatgaaaaatatatggctatgtgattgttgctcatgtagctcagctgtaggaagaactgtttttggacatggatctggggatggtgactggactcttgaggaaaggggagtaatgtgtgctcccttcatcatctatggacccaatccactccattccctcccagagagggggtgatggatgcagatccaggaggaagcactggttgtgatggagaatgcagagatgacacacatgagggagagggtctttgggggcttcaccaggccaagagtgcaccgagaaacacagttgttggcaggcacgttactttattggcgctgagcgggctggcaaggc

SEQ ID NO: 2123 - DNA, 495 bp, Artificial Sequence
  source: /note="Description of Artificial Sequence: Synthetic polynucleotide"
gcctccctcgcgccatcagcgttacttaggcttgaccaggacagaggacgctgggcccagagaaaggaggcagaaggaaagccatcttacctgaagagacggtgaccattgtcccttggccccagatatcaaaaggtcgaccgttacttaggcttgatcaattaaaattcatggttgtgtacttgttgctcaggtagctcagctacaggaaacactgttttttggatgtggatctggagatagtgactggactcttgaggagtgggttggaatgtgcactccctcatgacctgtgcacctgattcgctccagtcccttccttgcggggggtgatggatgcagctccagcaggaagcactggttgtgatggagaatgcagagacagcacaggtgagagagagggtctgtgagagcttcactagcccaagagtgcaggagaaacacagttgttggcatgcaccgttacttaggcttgactgagcgggctggcaaggc

SEQ ID NO: 2124 - DNA, 495 bp, Artificial Sequence
  source: /note="Description of Artificial Sequence: Synthetic polynucleotide"
gcctccctcgcgccatcagcgttacttacacacgtccaggacagaggacgctgggcccagagaaaggaggcagaaggaaagccatcttacctgaagagacggtgaccattgtcccttggccccagatatcaaaaggtcgaccgttacttacacacgttcagcttaaaaatacatggctatgtgcttgttgctcatgtagctcagctgtaggaagaactgcttttttggacacggatctggggatggtgactggacacttgaggagtgggtggtaatgtgtgctcccttcatgacctatgcacccaatccactccattcccttccctggggggctgatggatccagcttcagcaggaagacctcgttatcacggggaacacagacacagcgcaggtaagggagagggtctgtgagggcttcaccaggccaagagtgcgctgagaaacacagttgttggcatcgttacttacacacgtctgagcgggctggcaaggc

SEQ ID NO: 2125 - DNA, 495 bp, Artificial Sequence
  source: /note="Description of Artificial Sequence: Synthetic polynucleotide"
gcctccctcgcgccatcagcgttactttagacggaccaggacagaggacgctgggcccagagaaaggaggcagaaggaaagccatcttacctgaagagacggtgaccattgtcccttggccccagatatcaaaaggtcgaccgttactttagacggatcaagtaatacatgaccttgtccttggctttcagattggtcattgtaaggcagactgcacttaaaagggtgttgcttgagattgttaatttatttgtactcatggaaagtaaccctgagaattcatacttgatcactcactgttggcacccacacctatccctgttgtgaagcgtgctggaccaagctcatgctgtaaccagtaaaggtgaaaccagaggctttgcaggagagtctcaccactgggctgtaaattttttccccctctgactccatcagtaaacttcacacaggacttccgtgacgttactttagacggactgagcgggctggcaaggc

SEQ ID NO: 2126 - DNA, 495 bp, Artificial Sequence
  source: /note="Description of Artificial Sequence: Synthetic polynucleotide"
gcctccctcgcgccatcagcgttacttgagcgataccaggacagaggacgctgggcccagagaaaggaggcagaaggaaagccatcttacctgaagagacggtgaccattgtcccttggccccagatatcaaaaggtcgaccgttacttgagcgatatcaagtaatacactgcctactcctcagctttccagtagataattttaagggagattgtgatgttaagtgttgtccccaggaactgtgaatcttctttgtgctggagcagagcaccactgagaacttccacttgggtcactcatggctaccacccactccagcccctctcctccagccatcagggcccaataaatgctgcagtcagtgaaggtgaatcttgatgctttgcagaagaagctaagagaatagccaggctattttgccaaagacaaaaatatagatccagtaaacctttgtggttttcgttacttgagcgatactgagcgggctggcaaggc

SEQ ID NO: 2127 - DNA, 495 bp, Artificial Sequence
  source: /note="Description of Artificial Sequence: Synthetic polynucleotide"
gcctccctcgcgccatcagcgttacttgcatctgaccaggacagaggacgctgggcccagagaaaggaggcagaaggaaagccatcttacctgaagagacggtgaccattgtcccttggccccagatatcaaaaggtcgaccgttacttgcatctgatcaagtaatacacggacttttcctgagctctcaggttaatcatcttaaaagagaatctcctgaactgagtgtatttgaggattgttaatcatctttttactcaaggagagtcccactgagaacttctatttgaattattgttattacccacacccacccctgtcatgaagcctgctggatcaagcttatgctgttttcagtgaaagtgaatccagaggctttgcagaaaaggcagaattcctggtctgtagtatttctctgtctaactccattagttaacttcacaggggacttctgaaaacacgttacttgcatctgactgagcgggctggcaaggc

SEQ ID NO: 2128 - DNA, 495 bp, Artificial Sequence
  source: /note="Description of Artificial Sequence: Synthetic polynucleotide"
gcctccctcgcgccatcagcgttactttgctacacccaggacagaggacgctgggcccagagaaaggaggcagaaggaaagccatcttacctgaagagacggtgaccattgtcccttggccccagatatcaaaaggtcgaccgttactttgctacactcaagtattacaaggccttgtccttgactttcagtttggtccctttaaggtagactgcacatgaaaaggtgtcgcttgggactgttaatttatttgtactcatggagagtaactctgagaactcccacttgatcactcactgtttccacccacaccaatccctgtcatgaagcctgctggaccaagctcatgctgtagccagtaaaggtgaaatcagaggctttgcatgagagtctcagtgaaccactgggctgtacaattttcccccctgactctatcagtaaatttcacacaggacttctgcgttactttgctacacctgagcgggctggcaaggc

SEQ ID NO: 2129 - DNA, 495 bp, Artificial Sequence
  source: /note="Description of Artificial Sequence: Synthetic polynucleotide"
gcctccctcgcgccatcagcgttacttaactgccaccaggacagaggacgctgggcccagagaaaggaggcagaaggaaagccatcttacctgaagagacggtgaccattgtcccttggccccagatatcaaaaggtcgaccgttacttaactgccatcactgtaatatacggccttgcccttggctttcaggttggtccttgtaaggtagactgcacttgaaagggtgtcacttgggaatgttgatttatctgtactcatggagagtaacccttagaactcccatatgatctctcactgttgctacccacaccaattcctgttgtgaagcgtgctggaccaagctcatgctgcacccagtaaacccgaaaccagaggctttgcaggacagtctcagtgaactgctgggctgttaaatttttctccttctgactccatcagtaaacatcacacaggacttcgttacttaactgccactgagcgggctggcaaggc

SEQ ID NO: 2130 - DNA, 495 bp, Artificial Sequence
  source: /note="Description of Artificial Sequence: Synthetic polynucleotide"
gcctccctcgcgccatcagcgttacttttggactgccaggacagaggacgctgggcccagagaaaggaggcagaaggaaagccatcttacctgaagagacggtgaccattgtcccttggccccagatatcaaaaggtcgaccgttacttttggactgtcaagtaatacacagacttgtcttgggctctcagttttattatcttaaaagagaatcttctgaacagtgtctctgaggactgttaatcttctttgtactgaaggcgagtcccattgagaacttccacttgaattactgttatctccctcaccaacacttgccatgaatcctgctggaccaaacttgttcttttttcagtgaatccaggggctttgcagaacagtctgagaattcttggtctgtagtattttcctgtctgactccactagttaacttcacagaggacttctgcacacacagaggcgttacttttggactgctgagcgggctggcaaggc

SEQ ID NO: 2131 - DNA, 495 bp, Artificial Sequence
  source: /note="Description of Artificial Sequence: Synthetic polynucleotide"
gcctccctcgcgccatcagcgttactttcggtactccaggacagaggacgctgggcccagagaaaggaggcagaaggaaagccatcttacctgaagagacggtgaccattgtcccttggccccagatatcaaaaggtcgaccgttactttcggtacttcacagtaataaacggaattttcctgagctctcaggttaatcatcttaagagagaatcatctgaaaagcgtgtctctgaggactgttaatcttctttgtactcaaggagagtcccactgagaacttccacttgaattactgatgttatcacctacacccacccctgtcatgaagcctgctggaccaagcttatgctgttttcagtgaaagtgaatccacagggtttccagaaaagtctgagaattcttggtctgtagtatttctctgagagactccagtaattaacttcacaggggacctctgcgttactttcggtactctgagcgggctggcaaggc

SEQ ID NO: 2132 - DNA, 495 bp, Artificial Sequence
  source: /note="Description of Artificial Sequence: Synthetic polynucleotide"
gcctccctcgcgccatcagcgttacttccatggatccaggacagaggacgctgggcccagagaaaggaggcagaaggaaagccatcttacctgaagagacggtgaccattgtcccttggccccagatatcaaaaggtcgaccgttacttccatggattcacacagttaaatgctgccatgttctgggttctcaggctgttcatttgcatgtacagcatgtacttggtgttgtctctggaagtggtgagtctgcccctaacatagtctgcattgtattgatgactttcactacgccatataactgcaacccattccagccccttccctgaggcctggcaaacccagtgaatctcatagatactgaaggtgaaccaagaggctgcacaggagagcctcaggggcccctctcagtgtaccaagtctcccccagactctgtaagctgggcctcaccctggataccgttacttccatggatctgagcgggctggcaaggc

SEQ ID NO: 2133 - DNA, 495 bp, Artificial Sequence
  source: /note="Description of Artificial Sequence: Synthetic polynucleotide"
gcctccctcgcgccatcagcgttacttacgaagatccaggacagaggacgctgggcccagagaaaggaggcagaaggaaagccatcttacctgaagagacggtgaccattgtcccttggccccagatatcaaaaggtcgaccgttacttacgaagattcacagtaatacactgcctacccctgtgagagccccctcagcttccaagtagattattttaagggagactgtgctggtaattggtgtccctgggaattgtgaatcttcattatgctgatgcagaatatcactgagaacttccacttgaatcaatcactgttaccacccactccagcctctgtcccccagccatctgggctcaatttatgctgtagtcagtgaaggtgaatcttgatgctttgcaaaagaggctaagagaacagccaggctgttttgccaaagataaaaatatagatccagtaacgttacttacgaagatctgagcgggctggcaaggc

SEQ ID NO: 2134 - DNA, 495 bp, Artificial Sequence
  source: /note="Description of Artificial Sequence: Synthetic polynucleotide"
gcctccctcgcgccatcagcgttacttactgtggaccaggacagaggacgctgggcccagagaaaggaggcagaaggaaagccatcttacctgaagagacggtgaccattgtcccttggccccagatatcaaaaggtcgaccgttacttactgtggatcaacagtattacacaaccttgtccttggctttcaggttagtcattgtaaggtagagtgcacgtgaaagggtgtcgctggaccagttaatttatttgtactcatgaagagtaaacctgagcactcccacttgttgactcactgttgccagccaccacaatccctgttgtgaagcctgctggaccaacctcaggctgttgccagaaaaggtgaatccagacgctttgcaagaaagtctcagtgaaccactgggctgtactacgtttacccctctgactccaccactgaacttcatacaggacttcgttacttactgtggactgagcgggctggcaaggc

SEQ ID NO: 2135 - DNA, 495 bp, Artificial Sequence
  source: /note="Description of Artificial Sequence: Synthetic polynucleotide"
gcctccctcgcgccatcagcgttacttggtgtcatccaggacagaggacgctgggcccagagaaaggaggcagaaggaaagccatcttacctgaagagacggtgaccattgtcccttggccccagatatcaaaaggtcgaccgttacttggtgtcattcaagtaatacatggccttctcctcggctctcaggttggtcattttgagggagactgtgctgacaagggtgtccctgaggattatgatttttctttgtattgatggagggtaccactaacaaattccacttgaatccctcgcttttgcctcccacaccaacccctgtcctgaagcctgctgggctgagctcatgctagagtcaatgaaggtaaattcagaggctttgtaaaaaaggctctgagaacagttaggctgtatcatttctcttccagattccaccagtgaacttcttgtaggactctcgttacttggtgtcatctgagcgggctggcaaggc

SEQ ID NO: 2136 - DNA, 495 bp, Artificial Sequence
  source: /note="Description of Artificial Sequence: Synthetic polynucleotide"
gcctccctcgcgccatcagcgttactttcgtgaagccaggacagaggacgctgggcccagagaaaggaggcagaaggaaagccatcttacctgaagagacggtgaccattgtcccttggccccagatatcaaaaggtcgaccgttactttcgtgaagtcacagtaatacaaggtcttgtccttggctttcacattggtcattttaaggtagactgcacttgaaagggtgttgcttgggactgttaatttacttgtactcatggagagtaaccctgataactcactgttgccacccacacaaatccctgtcatgaagcctgctggaccaagctcatgctgtagccagtacaagtgaaatcagaggctttgcaggagagtctgtgagaaccgctgggctgtacaatgtttccccctctgactccatcagtaagcttcaacaggacttacatgaacacagaggcgttactttcgtgaagctgagcgggctggcaaggc

SEQ ID NO: 2137 - DNA, 495 bp, Artificial Sequence
  source: /note="Description of Artificial Sequence: Synthetic polynucleotide"
gcctccctcgcgccatcagcgttacttcactagctccaggacagaggacgctgggcccagagaaaggaggcagaaggaaagccatcttacctgaagagacggtgaccattgtcccttggccccagatatcaaaaggtcgaccgttacttcactagcttcacacagtaatacacgcctgcatccccagccatcacacttctcagctgtaagttttcttgttttttactatgtgtttctggagatgctagctctgccctgaaggttggggcttagtgtttcccttaacccatatcacaccaacacactgaagaccttttgatgggagatggtggatccaggaaacagaatgttcagaaattgaatgtgcataggcggcataggtgaggctgagcatgaccaaggggaccactacttcttcctcccattgcacaaggtggtcctcactgtgaacccctgagaacgttacttcactagctctgagcgggctggcaaggc

SEQ ID NO: 2138 - DNA, 495 bp, Artificial Sequence
  source: /note="Description of Artificial Sequence: Synthetic polynucleotide"
gcctccctcgcgccatcagcgttacttggtcaactccaggacagaggacgctgggcccagagaaaggaggcagaaggaaagccatcttacctgaagagacggtgaccattgtcccttggccccagatatcaaaaggtcgaccgttacttggtcaacttcagcacagtagtacacatctatgtcctcagatctctgactgctcagctccatgtaggctgtgctcgtggacgtgtccctggtcatggtgactctgccctgaaacttctgtgcatagcctgtgttaccattgccagagtagctccctaccatccattcaaacccttatccaggggcctgtcacacacagtgaatgtcgtagctggcgaaggtgtatccagagctttgcaggagaccttcactgaggccatggacgctggcaacaggagagtcatcagaagctgggtgagtcatataatcaggacgttacttggtcaactctgagcgggctggcaaggc

SEQ ID NO: 2139 - DNA, 495 bp, Artificial Sequence
  source: /note="Description of Artificial Sequence: Synthetic polynucleotide"
gcctccctcgcgccatcagcgttactttacgtacgccaggacagaggacgctgggcccagagaaaggaggcagaaggaaagccatcttacctgaagagacggtgaccattgtcccttggccccagatatcaaaaggtcgaccgttactttacgtacgtcaacaggaatacacgaccatgtcttcagatctcaggctgctcagctccatgtaggctgtgctcacggacctgtcactggtaatggtgactctgccccggaacttctgtgcgtagtgtgtgttatcattgtaagggttgatgcatcccaaccactatgcccttgtccagggccctgtcgcacccactgtgtaaagtatttggtgaaggtgtatctggaagcctggccaggagaccttcactgaggacgcaggcttcttcacctcagccccaggctgcaacagctgaacctgggaatggacatccgttactttacgtacgctgagcgggctggcaaggc

SEQ ID NO: 2140 - DNA, 495 bp, Artificial Sequence
  source: /note="Description of Artificial Sequence: Synthetic polynucleotide"
gcctccctcgcgccatcagcgttacttatgacaccccaggacagaggacgctgggcccagagaaaggaggcagaaggaaagccatcttacctgaagagacggtgaccattgtcccttggccccagatatcaaaaggtcgaccgttacttatgacacctcacacagtaatacatggccgtgtcttcagatctcaggctgctcagctccatgtaggctgtgctcgtggatgtgtccctggtcatggtgactctgccctggaacttctctgcgtagcttatgctgccatcactagggcacatccttcccatccactcaagcccttgtgcatgggcctggcgcacctagtgcatagagtaactggtgaaggtaggtgtatccacaagtcttgcaggagactttcactgatgccccagccttcttcatctcatccccagactgcaccagctgcacctgggactggcgttacttatgacaccctgagcgggctggcaaggc

SEQ ID NO: 2141 - DNA, 495 bp, Artificial Sequence
  source: /note="Description of Artificial Sequence: Synthetic polynucleotide"
gcctccctcgcgccatcagcgttacttcttcacgaccaggacagaggacgctgggcccagagaaaggaggcagaaggaaagccatcttacctgaagagacggtgaccattgtcccttggccccagatatcaaaaggtcgaccgttacttcttcacgatcacccagtaatacacagccgagtcctcagatctcaggctgctcagctctatgtaggctgtcctcagggacatgtccctggtaatggtgactctgccctggaacttctttgcatagttggtgttaccattgtaaagtgtgatccatctcatcctttcaagcccttgtccaggggcctgttgcaaccagtgcaaggagcagcaagtgaaggtgtatccggaagccttgcaggagaccttcactgaggccccaggcttctttacctcagcctcagactgccccagctgcacctgggagcagacaccgttacttcttcacgactgagcgggctggcaaggc

SEQ ID NO: 2142 - DNA, 495 bp, Artificial Sequence
  source: /note="Description of Artificial Sequence: Synthetic polynucleotide"
gcctccctcgcgccatcagcgttacttagaatcagccaggacagaggacgctgggcccagagaaaggaggcagaaggaaagccatcttacctgaagagacggtgaccattgtcccttggccccagatatcaaaaggtcgaccgttacttagaatcagtcacacagtaatacacgaccatgtcttcagatctcaggctgctcagctccatgtaggctgtgctcatggacctgtcactggtaatggtgactctgccccagaacgtctgtgcatagtgtgtgttatcattgtaagggttgattcatcccatccactatgcccttgtccagggctttgtcacacccaccgtgtaaagtatttggtgaaggtgtatctggaagcctggcaggagaccttcactgaggacccaggcttcttcacctcagccccaggctgcaacagctgaacctgggaatggacacccgttacttagaatcagctgagcgggctggcaaggc

SEQ ID NO: 2143 - DNA, 495 bp, Artificial Sequence
  source: /note="Description of Artificial Sequence: Synthetic polynucleotide"
gcctccctcgcgccatcagcgttacttagttatgcccaggacagaggacgctgggcccagagaaaggaggcagaaggaaagccatcttacctgaagagacggtgaccattgtcccttggccccagatatcaaaaggtcgaccgttacttagttatgctcatgcacagtaatgtgtggctgtgtccacaatgtccatgttgatcactgttagaaccacttcattcttggaggtgtccttggagataatgagcctactcttcagagatgggctgtagtatttattatcattctaataaatgtgtgcaagccactccagggcctttgctgagggctgacagatctaacccacacccattccagaagtgctgagtgagaacccagagaaggtgcaggtcagcatgagggtctgtgtgggtttcaccagtgcaggaccagactccttcaaggtgacctgggataacgttacttagttatgcctgagcgggctggcaaggc

SEQ ID NO: 2144 - DNA, 495 bp, Artificial Sequence
  source: /note="Description of Artificial Sequence: Synthetic polynucleotide"
gcctccctcgcgccatcagcgttacttaggtctcaccaggacagaggacgctgggcccagagaaaggaggcagaaggaaagccatcttacctgaagagacggtgaccattgtcccttggccccagatatcaaaaggtcgaccgttacttaggtctcatcacagagtcatatgcagctgcatcctctgccctcagtctgttcatttgcagatacagtgagtttttggtattgtctctggaaatggtgaatcggcccttcacagagtctgcgtagtacatggtactaccactaccactaataactgggacccactgcagacccttccctggagcctgggggacccagtgcgtgctatggctactgaaggtgaatccagaggctgcacaggagagtctcagggacacccaggctttgtcaagtttgctccagactctaccagctgcatctcacactggacacccgttacttaggtctcactgagcgggctggcaaggc

SEQ ID NO: 2145 - DNA, 495 bp, Artificial Sequence
  source: /note="Description of Artificial Sequence: Synthetic polynucleotide"
gcctccctcgcgccatcagcgttacttgtcatagtccaggacagaggacgctgggcccagagaaaggaggcagaaggaaagccatcttacctgaagagacggtgaccattgtcccttggccccagatatcaaaaggtcgaccgttacttgtcatagttcacacagtaatacacagccatgtcctcgggcctcaggctgttcatttgctgatacaggaagttcctggaattgtctctggagatgatgaatcggcccttcacagagtctgcatagtgcgtcctactgccattccaactaacacccgatacccactccagcccctttcctggagcctggcggacccagttcatgtcactgttactgaaggtgaatccagaggctgcacaggagagtctcagggaccccccaggctctaccaagcctcccccagactccaccagctgcactgttgtacccaggtcgttacttgtcatagtctgagcgggctggcaaggc

SEQ ID NO: 2146 - DNA, 495 bp, Artificial Sequence
  source: /note="Description of Artificial Sequence: Synthetic polynucleotide"
gcctccctcgcgccatcagcgttacttgtgacttgccaggacagaggacgctgggcccagagaaaggaggcagaaggaaagccatcttacctgaagagacggtgaccattgtcccttggccccagatatcaaaaggtcgaccgttacttgtgacttgtcaacagtaatacacggccgtgtcctcggttttcaggctcttcatttgcagataggtgatgcttttggaatcatctcttgagattgtgaatctgcctttcacagacgtggtctattctgttgtcccaccattagctttgtttctaatgaaacctacccattccagccccttcccgggagcctggcggaccccgctcatgtagtagtaactgaaggtgaatccagaggctgcacaggagagtctcagggaccccccaggctgtaccaagcctcccccagactccaccagctgcacctcacactgcgttacttgtgacttgctgagcgggctggcaaggc

SEQ ID NO: 2147 - DNA, 495 bp, Artificial Sequence
  source: /note="Description of Artificial Sequence: Synthetic polynucleotide"
gcctccctcgcgccatcagcgttacttgattgcagccaggacagaggacgctgggcccagagaaaggaggcagaaggaaagccatcttacctgaagagacggtgaccattgtcccttggccccagatatcaaaaggtcgaccgttacttgattgcagtcaacactaatagagggccgtgtcctcggttttcaggctgttcatttgcagatgaagtgtgttcttggcgttatctctggaggtattgaatcggtccttaccggagtctatgaggtatgtgctacccccattaggattaacttgtcaaaccaactccagcccattccctggagcctggcggacacagttcatgtagtagctactgaaggtgaattgagaggctgcacaggagagtctcggggaccacgcaggctttgccaagcctcccccagactccaccagctgcatctcacactggatacccgttacttgattgcagctgagcgggctggcaaggc

SEQ ID NO: 2148 - DNA, 495 bp, Artificial Sequence
  source: /note="Description of Artificial Sequence: Synthetic polynucleotide"
gcctccctcgcgccatcagcgttacttactatgacccaggacagaggacgctgggcccagagaaaggaggcagaaggaaagccatcttacctgaagagacggtgaccattgtcccttggccccagatatcaaaaggtcgaccgttacttactatgactcatgtacagccatacacagccatgtcctcagttctctgactgttcatttgcagatacagagagttcttagcattgtctttggagatggagaatctgcccttcacagagtctgcatggtgtatctgacttccatcatcttttatatctattactcactccagccccttgcctgcagactggtgaactgggctcattcagaagctactgaaggcgaatctagaggctacacaggagagtctcaggaacttcccaggttgtctcaggtcctctgtgggctctatcagctccacctcacactgaaccgttacttactatgacctgagcgggctggcaaggc

SEQ ID NO: 2149 - DNA, 495 bp, Artificial Sequence
  source: /note="Description of Artificial Sequence: Synthetic polynucleotide"
gcctccctcgcgccatcagcgttacttatggtcaaccaggacagaggacgctgggcccagagaaaggaggcagaaggaaagccatcttacctgaagagacggtgaccattgtcccttggccccagatatcaaaaggtcgaccgttacttatggtcaatcacatacagtaacacacagctgtgcccgctgctctcagactgttcattagcaaatacagtgagttcttggcattttctttggagatggtgaatttgctcttcaaagattatgcataacatatctgacttccatcacactgtatatctactactcactccagccccttccctggagcctgggaaaccgagttccttcagtagctactgaaggttaatccagagtctgcacaggagagtctcagggatcccccaggttgtcttgggtcctctccggactccacgagctgtacctctcactagaccgttacttatggtcaactgagcgggctggcaaggc

SEQ ID NO: 2150 - DNA, 495 bp, Artificial Sequence
  source: /note="Description of Artificial Sequence: Synthetic polynucleotide"
gcctccctcgcgccatcagcgttacttgatggcttccaggacagaggacgctgggcccagagaaaggaggcagaaggaaagccatcttacctgaagagacggtgaccattgtcccttggccccagatatcaaaaggtcgaccgttacttgatggctttcatgtatagccatacacggccacgtcctcagctctctgagtgttcatttgcagatacagagagttcttagcattgtctttggagatggagaatctgcccttcacagagtctgcatggtgtatctgacttccatcatcttttatatctattactcactccagccccttgcctggagactggtgaactcggctcattcagaagctactgaaggcgaatctagaggctacacaggagagtctcaggaacttcccaggttgtctcaggtcctctatggactctatcagctccacctcacactgaaccgttacttgatggcttctgagcgggctggcaaggc

SEQ ID NO: 2151 - DNA, 495 bp, Artificial Sequence
  source: /note="Description of Artificial Sequence: Synthetic polynucleotide"
gcctccctcgcgccatcagcgttacttagcatatgccaggacagaggacgctgggcccagagaaaggaggcagaaggaaagccatcttacctgaagagacggtgaccattgtcccttggccccagatatcaaaaggtcgaccgttacttagcatatgtcacatacagtaacacacagctgtgccctctgctctcagactgttcatttgcaaatacagtgagttcttggcattttctttggagatggtgaatttgctcttcacagattgggcataacatatctgacttccatcacactgtatatctactactcactccagccccttccctggagcctgggaaaccgagctcattcagtagctactgaaggttaatccagagtctgcacaggagagtctcaaggatcccccaggttgtcttgggtcctctccggactccacgagctgtacctctcactagaccgttacttagcatatgctgagcgggctggcaaggc

SEQ ID NO: 2152 - DNA, 495 bp, Artificial Sequence
  source: /note="Description of Artificial Sequence: Synthetic polynucleotide"
gcctccctcgcgccatcagcgttacttcatatgctccaggacagaggacgctgggcccagagaaaggaggcagaaggaaagccatcttacctgaagagacggtgaccattgtcccttggccccagatatcaaaaggtcgaccgttacttcatatgcttcaagtaatacacagacctatcctcggctctgacgctgttcatttgcagatacagtgatttcttggcatcatctctggagagggtgaatcgacccttcacagagtctgcatagcttgtgctacctacacaacaactcataaatgagacctactccagccctttcccaggagcctgatggacccagctcatccagtacctaataaaggtactaaaggtgaatccagaggctgcaaaagaaagtctcagggacccccaggctataacaagcctcccaaagactccaccagctgcacctcacactgcgttacttcatatgctctgagcgggctggcaaggc

SEQ ID NO: 2153 - DNA, 495 bp, Artificial Sequence
  source: /note="Description of Artificial Sequence: Synthetic polynucleotide"
gcctccctcgcgccatcagcgttactttcgtcgatccaggacagaggacgctgggcccagagaaaggaggcagaaggaaagccatcttacctgaagagacggtgaccattgtcccttggccccagatatcaaaaggtcgaccgttactttcgtcgattcaacacagccgagtcctcatctctcagactgttcatttgcaagtacagcatgttcttgccattgtctctagagatggtgaatctacccttcagtgtctgcatagtataggctaccaccactagcactaatgtatgagacccattccagcccctttcttgaagcccggtgggcccagttcatgtcattgcttctcaagatgaatccgcaggctgcacatgagagtctcaggacacccccaaccccaccacagctgtaccaagtctcccccagactctaccagctgcacctcatactgcacacccgttactttcgtcgatctgagcgggctggcaaggc

SEQ ID NO: 2154 - DNA, 495 bp, Artificial Sequence
  source: /note="Description of Artificial Sequence: Synthetic polynucleotide"
gcctccctcgcgccatcagcgttacttcagtctgtccaggacagaggacgctgggcccagagaaaggaggcagaaggaaagccatcttacctgaagagacggtgaccattgtcccttggccccagatatcaaaaggtcgaccgttacttcagtctgttcaagtaatacatggccgtgtccttagctttcagactgtccatttgcagatagagcatgctcttagaattgtctcggagattgtgaatcggcccttcacagagtctgcatagtatttctgacttccatcattccagatatgtgccactcactccagccccttccctggagcctggcggacccagctcatgccatagctactaaaggagaatcctgaggctgcacaggagagtctcagggaccccccaggctggaccaagcctcccccagactccaccagctgcacctcacactggacacctgccgttacttcagtctgtctgagcgggctggcaaggc

SEQ ID NO: 2155 - DNA, 495 bp, Artificial Sequence
  source: /note="Description of Artificial Sequence: Synthetic polynucleotide"
gcctccctcgcgccatcagcgttacttaacgcgtaccaggacagaggacgctgggcccagagaaaggaggcagaaggaaagccatcttacctgaagagacggtgaccattgtcccttggccccagatatcaaaaggtcgaccgttacttaacgcgtatcagtacagtaatagatggccgtgtactcggttttcagggtattcacttgcagatacagtgtgttctttgaatcatctcttgagatggtgaacctgcctttcacagatgcagcgcattctgtcgtgtaactgttacgtttggttctaatacggccaacccactccagccctttcccagaagcctggcggatccagtgcattcagaagtcactgaaggtgaatctagaagctgcaaatgagagtctcggggacccacccaggctgtaccaagcctcccccagactccaccagctgcgcctcacgcgttacttaacgcgtactgagcgggctggcaaggc

SEQ ID NO: 2156 - DNA, 495 bp, Artificial Sequence
  source: /note="Description of Artificial Sequence: Synthetic polynucleotide"
gcctccctcgcgccatcagcgttacttgtagttcgccaggacagaggacgctgggcccagagaaaggaggcagaaggaaagccatcttacctgaagagacggtgaccattgtcccttggccccagatatcaaaaggtcgaccgttacttgtagttcgtcaacaataatacacagccatgtcctcagctatcaggctgttcatttgaagatacaaggacttcttggcgttgtctctggagatggtgaatcggcccatcacggagtctgcatagtatgtatcaccaccagtaccaatagctgatacccactccggacccttccctggagcccggcgaacccagtgcagaacatagctactgaaggcgaatccagaggctgcacaggagggtctcagggaccccccaggctgtaccaagcctcccccagactccaccagctgatcctcacactggacacctgccgttacttgtagttcgctgagcgggctggcaaggc

SEQ ID NO: 2157 - DNA, 495 bp, Artificial Sequence
  source: /note="Description of Artificial Sequence: Synthetic polynucleotide"
gcctccctcgcgccatcagcgttacttcgaactacccaggacagaggacgctgggcccagagaaaggaggcagaaggaaagccatcttacctgaagagacggtgaccattgtcccttggccccagatatcaaaaggtcgaccgttacttcgaactactcatgactcaataatacagagccatattctcagctctcagactgttcatttgcagatacaacctgtgcttggcattgtctttggagatggtgaatctgaccttcacagagtctgcatattatgtctgacttccatcgtacattatatctactactcactgcagcccctttcctggagcctggcagattcagctgatctagtagctacagaaggtggattcagaggatgcacggcagagtctcaggcacattcagcttgtgccaactctccccaagactccaccatctgcaccccacactagaccgttacttcgaactacctgagcgggctggcaaggc

SEQ ID NO: 2158 - DNA, 495 bp, Artificial Sequence
  source: /note="Description of Artificial Sequence: Synthetic polynucleotide"
gcctccctcgcgccatcagcgttacttttaacgtcccaggacagaggacgctgggcccagagaaaggaggcagaaggaaagccatcttacctgaagagacggtgaccattgtcccttggccccagatatcaaaaggtcgaccgttacttttaacgtctcaacagtaatacacggtcatgtcctcagctctcaggctgttcacttgcagatagagggagttcttggcattgtctctggagatggtcaatcggcccttcacagagtctacatagtatttctcacttccgtcacactttatgtcggccacccactccagccccttctccggagcctggcagacccagtgcatccaggagctactgaaggtgaatccagaggctgcacaggagagtctcagggaccctccaggctgtaccaagcctcacccagactccaccagctgcacctcacactggacacccgttacttttaacgtcctgagcgggctggcaaggc

SEQ ID NO: 2159 - DNA, 495 bp, Artificial Sequence
  source: /note="Description of Artificial Sequence: Synthetic polynucleotide"
gcctccctcgcgccatcagcgttacttagcaacctccaggacagaggacgctgggcccagagaaaggaggcagaaggaaagccatcttacctgaagagacggtgaccattgtcccttggccccagatatcaaaaggtcgaccgttacttagcaaccttcacatacagtaatacacggccgtgccctctgctctcagactgttcatttgcaaacagagtgagttcttggcattttctttggagatggtgaatctgctcttcacagattgtgcataacatagctgacttctatcctactatatatctactactcactccagccccttccctggagcctgggaatctgagctcattcagtagctactgaaggttaatccagagtctgcacaggagagtctcagggatcccccaagttgtctttggttttcttcagactccaccagctgtacctcacactggaccgttacttagcaacctctgagcgggctggcaaggc

SEQ ID NO: 2160 - DNA, 495 bp, Artificial Sequence
  source: /note="Description of Artificial Sequence: Synthetic polynucleotide"
gcctccctcgcgccatcagcgttacttttctcgagccaggacagaggacgctgggcccagagaaaggaggcagaaggaaagccatcttacctgaagagacggtgaccattgtcccttggccccagatatcaaaaggtcgaccgttacttttctcgagtcaacagtaatacacagccttgtccttggctttcaggttggtcattgtaaggtagactgcacatgaaaaggtgtcgcttgggactgttaatttatttgtactcatggagagtaactctgagaactcccacttgatcactcactgtttccacccacaccaatccctgtcatgaagcctgctggaccaagctcatgctgtagccagtaaaggtgaaatcagaggctttgcaggagagtctcagtgaaccactgggctgtacaattttctgcctctgactccatcaataaacttcacacaggacttcgttacttttctcgagctgagcgggctggcaaggc

SEQ ID NO: 2161 - DNA, 495 bp, Artificial Sequence
  source: /note="Description of Artificial Sequence: Synthetic polynucleotide"
gcctccctcgcgccatcagcgttacttactctacgccaggacagaggacgctgggcccagagaaaggaggcagaaggaaagccatcttacctgaagagacggtgaccattgtcccttggccccagatatcaaaaggtcgaccgttacttactctacgtcaacacagtaatacacagccatgtcgtcggctctcaggctgttcatttgcagatacagtgaattctgggcattgtctctagagatggtgaatcagcccttcacagagtctgtgtagagtacggtatcaccacttgtactaataactgagacccactccaaaccctttcctggagcctggtggacccagtgcatagcagagctactgaaggtgaatccagaggctgcacaggagagtctcagagaccctcccagtctttactaagcctcccccagactccaccagctgcacctcacactggaccgttacttactctacgctgagcgggctggcaaggc

SEQ ID NO: 2162 - DNA, 495 bp, Artificial Sequence
  source: /note="Description of Artificial Sequence: Synthetic polynucleotide"
gcctccctcgcgccatcagcgttactttaccggaaccaggacagaggacgctgggcccagagaaaggaggcagaaggaaagccatcttacctgaagagacggtgaccattgtcccttggccccagatatcaaaaggtcgaccgttactttaccggaatcaacagtagtacacaactgtgccctcggctctcaggctgttcatttgcagagacagtgaattctgggcattgtctctggagatggtgaatcggcccttcacagagtctgtgtagagtacggtatcaccacttgtactaataactgagacccactacaaaccctttcttggagcctggcggacccagtgcatagcagagctactgaaggtgaatccagaggctgcacaggagagtctcagggaccccccaggctggaccaagccttccccagactccaccagctgcacctcacactggacacccgttactttaccggaactgagcgggctggcaaggc

SEQ ID NO: 2163 - DNA, 495 bp, Artificial Sequence
  source: /note="Description of Artificial Sequence: Synthetic polynucleotide"
gcctccctcgcgccatcagcgttacttcgaattgcccaggacagaggacgctgggcccagagaaaggaggcagaaggaaagccatcttacctgaagagacggtgaccattgtcccttggccccagatatcaaaaggtcgaccgttacttcgaattgctcatgtacagccatgcatggtcatgtcctcagctctcagactgttcgtttggagatacggtgagttcttagcattgtctttggagatggtgaatctgcccttcacagagtctgcatggtatatctgacttccatcatattttacatctattactccctccagccccttccctagagtctcattgacccagctcattcagtagctactgaaggtgaatccagaggctacacaggagagtctcaggaacttcccaagttgtctcaggccctctatggactctatcagctccacctcacactgaaccgttacttcgaattgcctgagcgggctggcaaggc

SEQ ID NO: 2164 - DNA, 495 bp, Artificial Sequence
  source: /note="Description of Artificial Sequence: Synthetic polynucleotide"
gcctccctcgcgccatcagcgttacttttcgctcaccaggacagaggacgctgggcccagagaaaggaggcagaaggaaagccatcttacctgaagagacggtgaccattgtcccttggccccagatatcaaaaggtcgaccgttacttttcgctcatcagtatagtaatacacggccgtgtcctcggttttcaggctgttcatttgcagataggcgatgcttttggaatcatcgcttgagatggtgaatctgcctttcacagacgcggcgtattctgttgttccacgattagttttgtttttagtgaaacctacccactccagcccctttcctggagcccggcagatccactgcatgcagtagttaacggaaggtgaatccagaggctgcacaggagagtctcagggaccccccaggctgtaccaagcctcccccagactccaccagctgcacctcacacgttacttttcgctcactgagcgggctggcaaggc

SEQ ID NO: 2165 - DNA, 495 bp, Artificial Sequence
  source: /note="Description of Artificial Sequence: Synthetic polynucleotide"
gcctccctcgcgccatcagcgttacttgacgttaaccaggacagaggacgctgggcccagagaaaggaggcagaaggaaagccatcttacctgaagagacggtgaccattgtcccttggccccagatatcaaaaggtcgaccgttacttgacgttaatcaacagtaatacacggccgtgtcctcggctctcaggctgttcatttgcagataggtgatgcttttggaatcatctcttgagattgtgaatctgcctttcacagacgtggtctattctgttgtcccaccattagctttgtttctaatgaaacctacccactccagccccttcccgggagcctggcggacccagctcatgtagtagtcactgaaggtgaatccagaggctgcacaggagagtctcagggaccccccaggctggaccaagcctcccccggactccaccagctgcacctcacactgcgttacttgacgttaactgagcgggctggcaaggc

SEQ ID NO: 2166 - DNA, 495 bp, Artificial Sequence
  source: /note="Description of Artificial Sequence: Synthetic polynucleotide"
gcctccctcgcgccatcagcgttacttcgtagagtccaggacagaggacgctgggcccagagaaaggaggcagaaggaaagccatcttacctgaagagacggtgaccattgtcccttggccccagatatcaaaaggtcgaccgttacttcgtagagttcacacagtaatacgtggctgtgtactcagctctcaaactgttcatttccagataagagtgtgttcttggcattgtttctggagatggggaatcagaacttcccagaatgtgcatagcgtatgctactcccatcagtactaatacatgagacccactccagtctgttccctggagcctggcaggcccagtgcatccagtggctactgaaggcaaatccagaggctgcacaggacagtctcagggacccccacccccaccgcgccaggctgtaccaagtctcccccaggctccaacaactgcgccgttacttcgtagagtctgagcgggctggcaaggc

SEQ ID NO: 2167 - DNA, 495 bp, Artificial Sequence
  source: /note="Description of Artificial Sequence: Synthetic polynucleotide"
gcctccctcgcgccatcagcgttacttttccggtaccaggacagaggacgctgggcccagagaaaggaggcagaaggaaagccatcttacctgaagagacggtgaccattgtcccttggccccagatatcaaaaggtcgaccgttacttttccggtatcacagtaatagacggccatggtgtcagcaatgaaactgtttatttgcagatacagtgagttcttggtgttttctctggagatggtcaaccggcccttcacagagtctgagtagtatatgcctccaccactagcattaatgtaagacccactccagtcccttccctggagcttggtccacctagtgcatgccatagttactgaaagtgtatccagaggctgcacaggagagtcacatggaccccccaagctgtaccaagcctcccccagactctaccagctacacttcacattggacacctgccgttacttttccggtactgagcgggctggcaaggc

SEQ ID NO: 2168 - DNA, 495 bp, Artificial Sequence
  source: /note="Description of Artificial Sequence: Synthetic polynucleotide"
gcctccctcgcgccatcagcgttacttgcaattcgccaggacagaggacgctgggcccagagaaaggaggcagaaggaaagccatcttacctgaagagacggtgaccattgtcccttggccccagatatcaaaaggtcgaccgttacttgcaattcgtcacatacagtaacacacagctgtgccctctgctctcagactgttcatttgcaaatacagtgagttcttggcattttctttggagacggtgaatctgctcgtcacagattgtgcataacatatctgacttccatcacactgtatatctactactcactccagccccttccctggagcctgggaaaccgagctcattcagtagctactgaaggttaatccagaggctgcacaggagagtctcagggaacccaggttgtcttgggtcctctccagactccaccagctgtacctcacactggacaccgttacttgcaattcgctgagcgggctggcaaggc

SEQ ID NO: 2169 - DNA, 495 bp, Artificial Sequence
  source: /note="Description of Artificial Sequence: Synthetic polynucleotide"
gcctccctcgcgccatcagcgttactttgagcgaaccaggacagaggacgctgggcccagagaaaggaggcagaaggaaagccatcttacctgaagagacggtgaccattgtcccttggccccagatatcaaaaggtcgaccgttactttgagcgaatcaacagtaatacacagccgtgtcctcggctctcaggctgttcatttgcagatacagtgagttcttggcgttgtctctggagatggtgaatcggcccttcacagagtctgcgtagtatatggtactactactactaatggatgagacccactccagccccttccctggagcctggcggacccagttcatgtagtagtcactgaaggtgaatccagaggctgcacaggagagtctcagggaccccccaggctttaccaagcctcccccagactccaccagctgcacctcacactggacacctgccgttactttgagcgaactgagcgggctggcaaggc

SEQ ID NO: 2170 - DNA, 495 bp, Artificial Sequence
  source: /note="Description of Artificial Sequence: Synthetic polynucleotide"
gcctccctcgcgccatcagcgttactttactaagcccaggacagaggacgctgggcccagagaaaggaggcagaaggaaagccatcttacctgaagagacggtgaccattgtcccttggccccagatatcaaaaggtcgaccgttactttactaagctcaacagtaatacacggccgtgtccgcggcggtcacagagctcagcttcaggtagaactggttcttggacgtgtctacggacatggtgattcgactcttgagggacgggttgtagtaggtgctcccactatgatggatttccccaatccactccagccccttccctgggggctggcggacccagattcaccagttaccactgctgatggagtcaccagagacagcgcagatgagggacagggtctccgaaggcttcaccagtcctgggcccgactcctgcagctgcacctgggacaggacccccgttactttactaagcctgagcgggctggcaaggc

SEQ ID NO: 2171 - DNA, 495 bp, Artificial Sequence
  source: /note="Description of Artificial Sequence: Synthetic polynucleotide"
gcctccctcgcgccatcagcgttactttggcgtatccaggacagaggacgctgggcccagagaaaggaggcagaaggaaagccatcttacctgaagagacggtgaccattgtcccttggccccagatatcaaaaggtcgaccgttactttggcgtattcactgcgcccgccccctccgcctccctgcggtcacagagctcagcttcagggaaaactggttcttggacgtttctattgacatggtgactcaactcctgagggacggggtgtagtagctcctcccactataatagatgtatccaatccattccagccccttccctggggactggcggaccagctccaccagttaccactgctgatggagtcaccagagacagcgcatgtgagggacagggtctccgaagcttcaccagtcctgggccccactcctgcagctgcactgggacaggacccctgtcgttactttggcgtatctgagcgggctggcaaggc

SEQ ID NO: 2172 - DNA, 495 bp, Artificial Sequence
  source: /note="Description of Artificial Sequence: Synthetic polynucleotide"
gcctccctcgcgccatcagcgttacttgataaccaccaggacagaggacgctgggcccagagaaaggaggcagaaggaaagccatcttacctgaagagacggtgaccattgtcccttggccccagatatcaaaaggtcgaccgttacttgataaccatcattagatggtccctctcacacaataatacatggcggcgtccgaggccttcaggctgctccactgcaggtaggcggtgctgctggagctgtcggctgagatggtgacgtggccttggaaggatgggctgtatctggtatcagagttcccaggatagatgctccccatccactccagttctttcccgggcatctggcgcacccagtggatccagtagctggtaaagctgtatccagaagtcttacaggagatcctcagagactccccgggtcttttcacctctgctgcagactgcaacagctgcgttacttgataaccactgagcgggctggcaaggc

SEQ ID NO: 2173 - DNA, 495 bp, Artificial Sequence
  source: /note="Description of Artificial Sequence: Synthetic polynucleotide"
gcctccctcgcgccatcagcgttacttctagtgaaccaggacagaggacgctgggcccagagaaaggaggcagaaggaaagccatcttacctgaagagacggtgaccattgtcccttggccccagatatcaaaaggtcgaccgttacttctagtgaatcagcacgtgtcctcagcctttaggctgctgatatgaagatatgccatgctgacggaggtgtccatggagaagacaaaccgtcctgtgaagccctgggcatacgttaggttcccagtgttggtgttgatccatcccatttcctcaagcccttgtccatgggcctgtcatacccagctgatagcatagcttgtgaaggtgtatccagaagccttgcaggaaaccttcaatgaggctccaggcttcttcacctcaggcccagactgcaccagctgcacctgtgagtggacacctgtggagaggagcgttacttctagtgaactgagcgggctggcaaggc

SEQ ID NO: 2174 - DNA, 495 bp, Artificial Sequence
  source: /note="Description of Artificial Sequence: Synthetic polynucleotide"
gcctccctcgcgccatcagcgttacttacgttcacccaggacagaggacgctgggcccagagaaaggaggcagaaggaaagccatcttacctgaagagacggtgaccattgtcccttggccccagatatcaaaaggtcgaccgttacttacgttcactcaacagtaatactcggccgtgtcctcagcctttaggctgctgatctgaagacacgccgtgctgacagacgtgtccatggagaagacaaaccatcctgtgaagccgtgggtatacgttgggttcccagtgtaggtgatgatccatcacatccactcaaagccctgtccaggggtctatcatacccaattcataccatagatggtgaaggtgtaaccagaagacttataggagaccttcactgaggccccaggcttcttcacctcaggcccagactgcaccagctgcagggagtgggcacctgtcgttacttacgttcacctgagcgggctggcaaggc

SEQ ID NO: 2175 - DNA, 448 bp, Artificial Sequence
  source: /note="Description of Artificial Sequence: Synthetic polynucleotide"
gcctccctcgcgccatcagcgttacttattacgctccaggacagaggacgctgggcccagagaaaggaggcagaaggaaagccatcttacctgaagagacggtgaccattgtcccttggccccagatatcaaaaggtcgaccgttacttattacgcttcatctctcatacagtcatacacggccgtgtcctcagcctttaggctgctgatcttcagatacgccatgctgacagaggtgtccatggagaatagaaaccgtcctgtgaagccgttggtatatgttgggttcccagtgtaggtgatgatccatcccatccactcaagcccttgtccaggggctggtcacactgaattcataccatactggctgcatagtattccatgatttacatatatcatattttatctaatcacgttacttattacgctctgagcgggctggcaaggc

SEQ ID NO: 2176 - DNA, 495 bp, Artificial Sequence
  source: /note="Description of Artificial Sequence: Synthetic polynucleotide"
gcctccctcgcgccatcagcgttacttcattgagtccaggacagaggacgctgggcccagagaaaggaggcagaaggaaagccatcttacctgaagagacggtgaccattgtcccttggccccagatatcaaaaggtcgaccgttacttcattgagttcaacacagtaataaatggctgcatcctcagtctttaggcagctagtctgcagatccgccgtgctgacagaggtgtccatggagaagacaaaccgtgtgtgaatctgtgggcatacattgggttcaccagggtaggatgatccatcccatccactcaagcccctgtcctggggtctgtcgtatccaattcataccataggtgatgacagtttaaccagacaccttgcaggagaccttcgccgaggccccaggctgcttcacctcaggcccagactgcaccagctgcactcgggagtgggcacccgttacttcattgagtctgagcgggctggcaaggc

SEQ ID NO: 2177 - DNA, 495 bp, Artificial Sequence
  source: /note="Description of Artificial Sequence: Synthetic polynucleotide"
gcctccctcgcgccatcagtaggagaccttggttacagaaatgcagcaaaacccttcagagttaaagcaggagagaggttgtgaggactcacctgaggagacggtgaccagggttccctggccccagtagtcaaagtcgactaggagaccttggttatcaacagtaatacacggccgtgtcgtcagatctcagcctgctcagctccatgtaggctgtgctgatggacgtgtccctggtcatggtgaccctgccctgaaacttctgtgcatagtttgtgccaccactgttagggttgatccatcccatccactcaagcccttgtccaggggcctgtcgcacccagtgcatatagtagccggtgaaggtgtatccagaagccttgcaggagaccttcactgaggccccaggcttcttcacctcagccccagactgcaccagctgcacctgggagtgggctcctaggagaccttggttactgagcgggctggcaaggc

SEQ ID NO: 2178 - DNA, 495 bp, Artificial Sequence
  source: /note="Description of Artificial Sequence: Synthetic polynucleotide"
gcctccctcgcgccatcagtaggagacacctcttgcagaaatgcagcaaaacccttcagagttaaagcaggagagaggttgtgaggactcacctgaggagacggtgaccagggttccctggccccagtagtcaaagtcgactaggagacacctcttgtcaacagtaatacacagccatgtcctcagatctcaggctgctcagctccatgtaggctgtgctcgcggatgtgtccctggtaatggtgactctgccctggaactcctgtgaatattttgtgttaccattgccagcgttgctccatcccatccactcaagcctttgtccgggggcctggcgcacccaatgcatagcatagctagtgaaggtgtatccagaagccttgcaggaaaccttcactgaggccccaggcttcttcacctcagccccagactgcaccagctgaacctgggagtggacacctaggagacacctcttgctgagcgggctggcaaggc

SEQ ID NO: 2179 - DNA, 495 bp, Artificial Sequence
  source: /note="Description of Artificial Sequence: Synthetic polynucleotide"
gcctccctcgcgccatcagtaggagacctgattctcagaaatgcagcaaaacccttcagagttaaagcaggagagaggttgtgaggactcacctgaggagacggtgaccagggttccctggccccagtagtcaaagtcgactaggagacctgattcttcaacagtaatacacggccgtgtcctcagatctcaggctgctcagctccatgtaggctgtgcttatggaggtgttcctggtcatggtgactctgccctggaacttctgtgcatagcctgtgttaccactgttagggttcatccatcccatccactcaagcccttgtccagtggcctgtcgcacccagttgatatcataactggtgaaggtgtatccagaagccttgcaggagaccttcactgaggccccaggcttcttcacctcagccccagactgcaccagctgcacctgggagtgggcacctaggagacctgattctctgagcgggctggcaaggc

SEQ ID NO: 2180 - DNA, 495 bp, Artificial Sequence
  source: /note="Description of Artificial Sequence: Synthetic polynucleotide"
gcctccctcgcgccatcagtaggagacagtaccgacagaaatgcagcaaaacccttcagagttaaagcaggagagaggttgtgaggactcacctgaggagacggtgaccagggttccctggccccagtagtcaaagtcgactaggagacagtaccgatcaacagtaatacacggccgtgtcgtcagatctcaggctcctcagctccatgtaggctgtgctcgtggatgtgtctgtggtcatggtgactctgccctggagcttctgtgcatagtttgtgttaccattgtaagcgctgatccatcccatccactcaagcccttgtccaggggcctgtcgcacccagctgataccatagctggtaaaggtgtaaccagaagccttgcaggagaccttcactgaggccccaggcttcttcacctcagctccagactgcaccagctgaacctgggagtgggcacctaggagacagtaccgactgagcgggctggcaaggc

SEQ ID NO: 2181 - DNA, 495 bp, Artificial Sequence
  source: /note="Description of Artificial Sequence: Synthetic polynucleotide"
gcctccctcgcgccatcagtaggagacatccatggcagaaatgcagcaaaacccttcagagttaaagcaggagagaggttgtgaggactcacctgaggagacggtgaccagggttccctggccccagtagtcaaagtcgactaggagacatccatggtcaacagtaatacacggccgtgtcctcagatctcaggctgctcagctccatgtaggctgtgtctgtagatgtgtcctcggtcatggtgactctgccctggaacttctgtgcgtagattgtttcaccatcttcaggatcaaaacctcccatccactcaagcccttttccaggagcctgtcgcacccagtgcatggataattcagtgagggtgtatccggaaaccttgcaggagaccttcactgaggccccaggcttcttcacctcagccccagactgtaccagctggacctgggcgtgggtgcctaggagacatccatggctgagcgggctggcaaggc

SEQ ID NO: 2182 - DNA, 495 bp, Artificial Sequence
  source: /note="Description of Artificial Sequence: Synthetic polynucleotide"
gcctccctcgcgccatcagtaggagacgtagcagtcagaaatgcagcaaaacccttcagagttaaagcaggagagaggttgtgaggactcacctgaggagacggtgaccagggttccctggccccagtagtcaaagtcgactaggagacgtagcagttcaacagtaatacatggctgtgtcctcagatctcaggctgctcagctccatgtaggctgtgctcatagacctgtccctggtaatggtgactctgtcctggaatttctgtgcgtagttggtgttaccattgaaaggtgtgatccatcccatccactcaagcgcttgtccgggggcctgtcgcacccagtgcaggtagcggtaggtgaaggtgtatccggaagccttgcaggaaaccttcactgaggacccagtcttcttcacctcagccccagactgcaccagctgcatctgggagtaggcatctaggagacgtagcagtctgagcgggctggcaaggc

SEQ ID NO: 2183 - DNA, 495 bp, Artificial Sequence
  source: /note="Description of Artificial Sequence: Synthetic polynucleotide"
gcctccctcgcgccatcagtaggagacatcttcgtcagaaatgcagcaaaacccttcagagttaaagcaggagagaggttgtgaggactcacctgaggagacggtgaccagggttccctggccccagtagtcaaagtcgactaggagacatcttcgttcaacagtaatacacggccgtgtcctcagatctcaggctgctcagctccatgtagactgtgctcgtggacgtgtccctggtcatggtgactctgccctggaacttctgtgcgtagcttgtgctaccaccactagggttgattattcccatccactcaagcccttgtccaggggcctgtcgcacccagtgcatatagtagctggtgaaggtgtatccagatgccttgcaggaaaccttcactgaggccccaggcttcttcacctcagccccagactgcaccagctgcacctgggagtgagcacctaggagacatcttcgtctgagcgggctggcaaggc

SEQ ID NO: 2184 - DNA, 495 bp, Artificial Sequence
  source: /note="Description of Artificial Sequence: Synthetic polynucleotide"
gcctccctcgcgccatcagtaggagactccacagtcagaaatgcagcaaaacccttcagagttaaagcaggagagaggttgtgaggactcacctgaggagacggtgaccagggttccctggccccagtagtcaaagtcgactaggagactccacagttcaacagtaatacacggccgtgtcctcggatctcaggctgctcagctccatgtaggctgtgcttgtggacatgtccctggtaatggtgactctttcctggaacttctgtgcgtagtttgtgttaccactgccaacgacgatccatcctatccactcaaggcgttgtccacgagcctgtcgcacccactgcatagcagagctagtaaaggtgaatccagaagccttgcaggagaccttcactgaggtcccaggcttcttcacctcaggcccagactgcaccagctgcatttgggagtgggcacctaggagactccacagtctgagcgggctggcaaggc

SEQ ID NO: 2185 - DNA, 495 bp, Artificial Sequence
  source: /note="Description of Artificial Sequence: Synthetic polynucleotide"
gcctccctcgcgccatcagtaggagacagctagtgcagaaatgcagcaaaacccttcagagttaaagcaggagagaggttgtgaggactcacctgaggagacggtgaccagggttccctggccccagtagtcaaagtcgactaggagacagctagtgtcaacagtaatacacggccgtgtcctcagatctcaggctgctcagctccatgtaggctgtgctcgtggatttgtccgcggtaatcgtgactctgccctggaacttctgtgcgtagtttgctgtaccaaagatagggatgatccctcccatccactcaagcccttgtccaggggcctgtcgcacccagctgatagcatagctgctgaaggtgcctccagaagccttgcaggagaccttcaccgaggacccaggcttcttcacctcagccccagactgcaccagctgcacctgggactggacacctaggagacagctagtgctgagcgggctggcaaggc

SEQ ID NO: 2186 - DNA, 495 bp, Artificial Sequence
  source: /note="Description of Artificial Sequence: Synthetic polynucleotide"
gcctccctcgcgccatcagtaggagactaaccaagcagaaatgcagcaaaacccttcagagttaaagcaggagagaggttgtgaggactcacctgaggagacggtgaccagggttccctggccccagtagtcaaagtcgactaggagactaaccaagtcaatagtaatacacagccatgtcctcagatgtcaggctgctcaggtctgtgtaggctgtggttgtggacatgtccctggtcatggtgaatctgccctgaaacttcttggcatagcttgggctaccattgccagggttgatccatcccatccactcaagcccttgtccaggggactgttgcacccaatgtataccgtagctggtgatggtaaacccagaaaaactacaggagactttcactgaggccccagacttcctcacctcagcccaagactgcaccagctggacctgggagtgggcacctaggagactaaccaagctgagcgggctggcaaggc

SEQ ID NO: 2187 - DNA, 495 bp, Artificial Sequence
  source: /note="Description of Artificial Sequence: Synthetic polynucleotide"
gcctccctcgcgccatcagtaggagaccaagaggtcagaaatgcagcaaaacccttcagagttaaagcaggagagaggttgtgaggactcacctgaggagacggtgaccagggttccctggccccagtagtcaaagtcgactaggagaccaagaggttcaacagtaatacacggccgtgtcctcagatctcaggctgctcagctccatgtaggctgtgtctgtagacgtgtccgcggttatggtgactctgccctggaacttctctgcgtatattgtttcaccatcttcaggatcaacaagtcccatccactcaagcccttttccaggggcctgttgcacccagtgcatgtagtagtcggtgaaggtgtatccagaaaccttgcaggagattttcactgtagccccaggcttcttcacctcagccccagactgtaccagctggacctcggcgtgggtgcctaggagaccaagaggtctgagcgggctggcaaggc

SEQ ID NO: 2188 - DNA, 495 bp, Artificial Sequence
  source: /note="Description of Artificial Sequence: Synthetic polynucleotide"
gcctccctcgcgccatcagtaggagacagttgacccagaaatgcagcaaaacccttcagagttaaagcaggagagaggttgtgaggactcacctgaggagacggtgaccagggttccctggccccagtagtcaaagtcgactaggagacagttgacctcatgcacagtaatatgtggctgtgtccacagggtccatgttggtcattgtaaggaccacctggtttttggaggtgtccttggtgatggtgagcctgctcttcagagatgggctgtagcgcttatcatcattccaataaatgagtgcaagccactccagggcctttcctgggggctgacggatccagcccacacccactccactagtgctgagtgagaacccagagaaggtgcaggtcagcgtgagggtctgtgtgggtttcaccagcgtaggaccagactccttcaaggtgatctgggacaataggagacagttgaccctgagcgggctggcaaggc

SEQ ID NO: 2189 - DNA, 495 bp, Artificial Sequence
  source: /note="Description of Artificial Sequence: Synthetic polynucleotide"
gcctccctcgcgccatcagtaggagaccagcatatcagaaatgcagcaaaacccttcagagttaaagcaggagagaggttgtgaggactcacctgaggagacggtgaccagggttccctggccccagtagtcaaagtcgactaggagaccagcatattcatgcacagtaatatgtggctgtgtccacagggtccatgttggtcatggtaaggaccacctggcttttggaggtgtccttggagatggtgagcctgctcttcagagatgtgctgtaggatttttcgtcattcgaaaaaatgtgtgcaagccactccagggccttccctgggggctgacggatccagctcacacccattctagcattgctgagtgagaacccagagacggtgcaggtcagcgtgagggtctctgtgggtttcaccagcacaggaccagactccttcaaggtgacctgggacaataggagaccagcatatctgagcgggctggcaaggc

SEQ ID NO: 2190 - DNA, 495 bp, Artificial Sequence
  source: /note="Description of Artificial Sequence: Synthetic polynucleotide"
gcctccctcgcgccatcagtaggagacgcaggattcagaaatgcagcaaaacccttcagagttaaagcaggagagaggttgtgaggactcacctgaggagacggtgaccagggttccctggccccagtagtcaaagtcgactaggagacgcaggatttcatgcacaataatacgtggctgtgtccacagggtccatgttggtcattgtaaggaccacctggtttttggaggtgtccttggagatggtgagcctggtcttcagagatgtgctgtagtatttatcatcatcccaatcaatgagtgcaagccactccagggccttccctgggggctgacggatccagctcacacacattccactagtgctgagtgagaacccagagaaggtgcaggtcagtgtgagggtctgtgtgggtttcaccagcgcaggaccagactccctcaaggtgacctgggataataggagacgcaggattctgagcgggctggcaaggc

SEQ ID NO: 2191 - DNA, 495 bp, Artificial Sequence
  source: /note="Description of Artificial Sequence: Synthetic polynucleotide"
gcctccctcgcgccatcagtaggagacgtccattccagaaatgcagcaaaacccttcagagttaaagcaggagagaggttgtgaggactcacctgaggagacggtgaccagggttccctggccccagtagtcaaagtcgactaggagacgtccattctcaacagtaatacacagccgtgtcctcggctctcaggctgttcatttgcagatacagtgagttcttggcgttgtctctggagatggtgaatcggcccttcacagagtccacatagtatttctcacttccatcttgctttatgttggccacccactccagccccttccctggagcctggcggacccagctcatccaatagctactaaaggtgaatccagaggctgcacaggagagtctcagggaccccccaggctggaccaagcctcccccagactccaccagctgcacctcacactggacacctaggagacgtccattcctgagcgggctggcaaggc

SEQ ID NO: 2192 - DNA, 495 bp, Artificial Sequence
  source: /note="Description of Artificial Sequence: Synthetic polynucleotide"
gcctccctcgcgccatcagtaggagacgcataactcagaaatgcagcaaaacccttcagagttaaagcaggagagaggttgtgaggactcacctgaggagacggtgaccagggttccctggccccagtagtcaaagtcgactaggagacgcataacttcatgcacagtaatacaaggccgtgtcctcagctctcagactgttcatttgcagatacagggagttcttggcgttgtctctggagatggtgaatcggcccttcacagagtccgcatagcctatgctaccactattccaactaatacctgagacccactccaggcccttccctggagcttgccggacccagtgcatggcataatcatcaaaggtgaatccagaggctgcacaggagagtctcagggacctgccaggctgtaccaagcctcccccagactccaccagctgcacttcacactggactaggagacgcataactctgagcgggctggcaaggc

SEQ ID NO: 2193 - DNA, 495 bp, Artificial Sequence
  source: /note="Description of Artificial Sequence: Synthetic polynucleotide"
gcctccctcgcgccatcagtaggagacatatgctgcagaaatgcagcaaaacccttcagagttaaagcaggagagaggttgtgaggactcacctgaggagacggtgaccagggttccctggccccagtagtcaaagtcgactaggagacatatgctgtcaacagtaatacacggccgtgtcctcggctctcaggctgttcatttgcagatacagtgagttcttggcgttgtccctggagatggtgaatcggcccttcacagagtctgcgtagtatatggtactaccactactactaatgtatgaaacccactccagccccttccctggagcctggcggatccagctcatgtagtagtcactgaaggtgaatccagaggctgcacaggagagtctcagggaccctccaggcttgaccaagcctcccccagactccaccagctgcacctgacactggacacctaggagacatatgctgctgagcgggctggcaaggc

SEQ ID NO: 2194 - DNA, 495 bp, Artificial Sequence
  source: /note="Description of Artificial Sequence: Synthetic polynucleotide"
gcctccctcgcgccatcagtaggagacaatcctgccagaaatgcagcaaaacccttcagagttaaagcaggagagaggttgtgaggactcacctgaggagacggtgaccagggttccctggccccagtagtcaaagtcgactaggagacaatcctgctcaacagtaatacacagccgtgtccccggctctcaggctgttcatttgaagatacaaggagttcttggcattttctctggagatggtgaatcggcccttcacggagcctggatagtatgtgtcaccagcagtaccaatagctgagacccactccagaccttttcctgtagcttggcggacccagtgcatgtcgtagctactgaaggtgaatccagaggctgcacaggagagtctcagggaccccccaggctgtaccaagcctcccccagactccaccagctgcacctcacactggacacctgctaggagacaatcctgcctgagcgggctggcaaggc

SEQ ID NO: 2195 - DNA, 495 bp, Artificial Sequence
  source: /note="Description of Artificial Sequence: Synthetic polynucleotide"
gcctccctcgcgccatcagtaggagactgagacctcagaaatgcagcaaaacccttcagagttaaagcaggagagaggttgtgaggactcacctgaggagacggtgaccagggttccctggccccagtagtcaaagtcgactaggagactgagaccttcaacagtaatacacggctgtgtcctcggttttcaggctgttcatttgcagatacagcgtgttttttgaatcatctcttgagatggtgaatctgcctttcacgggtgcagcgtagtctgttgtcccaccatcagttttgcttttaatacggccaacccactccagccccttccctggagcctggcggacccagctcatccaggcgttactgaaagtgaatccagaggctgcacaggagagtctaagggaccccccaggctttaccaagcctcccccagactccaccagctgcacctcacactgtaggagactgagacctctgagcgggctggcaaggc

SEQ ID NO: 2196 - DNA, 495 bp, Artificial Sequence
  source: /note="Description of Artificial Sequence: Synthetic polynucleotide"
gcctccctcgcgccatcagtaggagacgaatggaccagaaatgcagcaaaacccttcagagttaaagcaggagagaggttgtgaggactcacctgaggagacggtgaccagggttccctggccccagtagtcaaagtcgactaggagacgaatggactcaacagtaatacacagccatgtcctcggctctccgtctgttcttttgcagatacagggagttcctggaattgtctctggagatgatgaatcggcgcttcacggagtccacatagtgcgtcctactgccattccaactaacacccgatacccactccagcccctttcctggagccttgcgggcccagttcatgtcactgttactgaaggtgaatccagaggctgcacaggagagtctcagggaccccccaggctgtaccaagcctcccccagactccaccagctgcacctcacactggacacctaggagacgaatggacctgagcgggctggcaaggc

SEQ ID NO: 2197 - DNA, 495 bp, Artificial Sequence
  source: /note="Description of Artificial Sequence: Synthetic polynucleotide"
gcctccctcgcgccatcagtaggagaccacatggacagaaatgcagcaaaacccttcagagttaaagcaggagagaggttgtgaggactcacctgaggagacggtgaccagggttccctggccccagtagtcaaagtcgactaggagaccacatggatcaacagtgatacaaggccgtgtcctcggctctcagactgttcatttgcagatacagggagttcttggcgttgtctctggagatggtgaatcggcccttcacagagtctgcataacctgtgctaccaccattccaattaataccagagacccactccagccccttccctggagcttggcggacccagctcatgccataatcatcaaaggtgaatccagaggctgcacaggagagtctcagggaccccccaggccgtaccacacctcccccagactccaccagctgcacctcacactggacacctaggagaccacatggactgagcgggctggcaaggc

SEQ ID NO: 2198 - DNA, 495 bp, Artificial Sequence
  source: /note="Description of Artificial Sequence: Synthetic polynucleotide"
gcctccctcgcgccatcagtaggagacttgaccatcagaaatgcagcaaaacccttcagagttaaagcaggagagaggttgtgaggactcacctgaggagacggtgaccagggttccctggccccagtagtcaaagtcgactaggagacttgaccattcaacagtaatacacagccgtgtcctcggctctcaggctgttcatttgcagatacagtgagttcttggcgttgtctctggagatggtgaatcggcccttcactgagtctgcgtagtatatgtaactactactactactaatggatgagacccactccagccccttccctggagcctggcggacccagttcatgctatagctactgaaggtgaatccagaggctgcacaggagagtctcagggaccccccaggcttgaccaggcctcccccagactccaccagctgcacctcacactggacacctaggagacttgaccatctgagcgggctggcaaggc

SEQ ID NO: 2199 - DNA, 495 bp, Artificial Sequence
  source: /note="Description of Artificial Sequence: Synthetic polynucleotide"
gcctccctcgcgccatcagtaggagacaagccatccagaaatgcagcaaaacccttcagagttaaagcaggagagaggttgtgaggactcacctgaggagacggtgaccagggttccctggccccagtagtcaaagtcgactaggagacaagccatctcaacagtaatatacggccgtgtcctcggctctcaggctgttcatttgcagatacagcgtgttcttggaattgtctctggagatggtgaaccggcccttcacggagtctgcgtagtatgtgctaccaccactaccactaatagctgagacccactccagccccttccctggagcctggcggacccagctcatggcatagctgctaaaggtgaatccagaggctgcacaggagagtctcagggaccccccaggctgtaccaagcctcccccagactccaacagctgcacctcacactggacacctaggagacaagccatcctgagcgggctggcaaggc

SEQ ID NO: 2200 - DNA, 495 bp, Artificial Sequence
  source: /note="Description of Artificial Sequence: Synthetic polynucleotide"
gcctccctcgcgccatcagtaggagactccatgtgcagaaatgcagcaaaacccttcagagttaaagcaggagagaggttgtgaggactcacctgaggagacggtgaccagggttccctggccccagtagtcaaagtcgactaggagactccatgtgtcaacagtaatacacagccgtgtcctcagctctcaggctgttcatttgcagatacagcgtgttcttggaattgtctctggagatggtgaatcggcccttcacggagtctgcatagtatttattacttccatcatatgatataactgccacccactccagccccttgcctggagcctggcggacccagtgcatgccatagctactgaaggtgaatccagaggctgcacaggagagtctcagggacctcccaggctggaccacgcctcccccagactccaccagctgcacctgacactggacacctaggagactccatgtgctgagcgggctggcaaggc

SEQ ID NO: 2201 - DNA, 495 bp, Artificial Sequence
  source: /note="Description of Artificial Sequence: Synthetic polynucleotide"
gcctccctcgcgccatcagtaggagaccaagtcaccagaaatgcagcaaaacccttcagagttaaagcaggagagaggttgtgaggactcacctgaggagacggtgaccagggttccctggccccagtagtcaaagtcgactaggagaccaagtcactcaacagtaatacacagccgtgtcctcagctctcaggctgttcatttgcagatacagcgtgttcttggaattgtctctggagatggtgaatcggcccttcacggagtctgcatagtatttattacttccatcatatgatataactgccacccactccagccccttgcctggagcctggcggacccagtgcatgccatagctactgaaggtgaatccagaggctgcacaggagagtctcagggacctcccaggctggaccacgcctcccccagactccaccagctgcacctgacactggacacctaggagaccaagtcacctgagcgggctggcaaggc

SEQ ID NO: 2202 - DNA, 495 bp, Artificial Sequence
  source: /note="Description of Artificial Sequence: Synthetic polynucleotide"
gcctccctcgcgccatcagtaggagacctgcaatccagaaatgcagcaaaacccttcagagttaaagcaggagagaggttgtgaggactcacctgaggagacggtgaccagggttccctggccccagtagtcaaagtcgactaggagacctgcaatctcaacagtaatacacagccgtgtcctcggctctcaggctgttcatttgcagatacagcgtgttcttggaattgtctctggagatggtgaatcggcccttcacggagtctgcatagtatttattacttccatcataccatataactgccacccactccagccccttgcctggagcctggcggacccagtgcatgccatagctactgaaggtgaatccagacgctgcacaggagagtctcagggacctcccaggctggaccacgcctcccccagactccaccagctgcacctgacactggacacctaggagacctgcaatcctgagcgggctggcaaggc

SEQ ID NO: 2203 - DNA, 495 bp, Artificial Sequence
  source: /note="Description of Artificial Sequence: Synthetic polynucleotide"
gcctccctcgcgccatcagtaggagacatcgacgacagaaatgcagcaaaacccttcagagttaaagcaggagagaggttgtgaggactcacctgaggagacggtgaccagggttccctggccccagtagtcaaagtcgactaggagacatcgacgatcaacagtaatacacagccgtgtcctcggccctcaggctattcgtttgcagatacagggtgttcctggaattgtctctggagatgatgaatcggcccttcacagagtctgcatagtgcgtcctactgccattccaactaacacccgatacccactccagcccctttcctggagcctgatggacccagttcatgtcactgttactgaaggtgaatccagaggctgcacaggagagtctcagggatcccccaggctgtaccaagcctcccccagactccaccagctgcacctcacactggacacctaggagacatcgacgactgagcgggctggcaaggc

SEQ ID NO: 2204 - DNA, 495 bp, Artificial Sequence
  source: /note="Description of Artificial Sequence: Synthetic polynucleotide"
gcctccctcgcgccatcagtaggagacacagactgcagaaatgcagcaaaacccttcagagttaaagcaggagagaggttgtgaggactcacctgaggagacggtgaccagggttccctggccccagtagtcaaagtcgactaggagacacagactgtcaacagtaatacacggccgtgccctcagctctcaggttgttcatttgaagatacagcgtgttcttggaattgtctctggagatggtgaatctgcccttcctggagtctgcgtagtatgtgctaccaccactaatggatgagacccactccagccccttccctggagcctggcggatccagctcatctcattgctactgacggtgaatccagaggctgcacaggagagtctcagggaccccctaggctgtaccaagcctcccccagactccaccagctgcacctcacactggacacctgcaaataggagacacagactgctgagcgggctggcaaggc

SEQ ID NO: 2205 - DNA, 495 bp, Artificial Sequence
  source: /note="Description of Artificial Sequence: Synthetic polynucleotide"
gcctccctcgcgccatcagtaggagacccttatagcagaaatgcagcaaaacccttcagagttaaagcaggagagaggttgtgaggactcacctgaggagacggtgaccagggttccctggccccagtagtcaaagtcgactaggagacccttatagtcatgcacagtaatacaaggcggtgtcctcagttctcagactgttcatttgcagatacagggagtttttgctgttgtctctggagatggtgaatcggcccttcacagagtctgcatagtatgtgctaccaccatcccaactaataagagagacccactccagacccttccccggagcttgacggacccagtgcatggtataatcatcaaaggtgaatccagaggctgcacaggagagtctcagggaccccccaggctgtaccacgactcccccagactccaccagctgcacttcacactggactaggagacccttatagctgagcgggctggcaaggc

SEQ ID NO: 2206 - DNA, 495 bp, Artificial Sequence
  source: /note="Description of Artificial Sequence: Synthetic polynucleotide"
gcctccctcgcgccatcagtaggagactacgcgttcagaaatgcagcaaaacccttcagagttaaagcaggagagaggttgtgaggactcacctgaggagacggtgaccagggttccctggccccagtagtcaaagtcgactaggagactacgcgtttcaacagtaatacacagccgtgtcctcgtctctcaggctgttcatttgcagatacagtgagttcttggcattgtctctggagatggtgaatcggcccttcacagagtctgcgtagtatatggtactactactactactaatgtatgaaacccactccagccccttccctggagcctggcggacccagttcatgctatagctactgaaggtgaatccagaggctgcacaggagagtctcagggaccccccaggctgtaccaagcctcccccagactccaccagctgcacctcacactggacacctaggagactacgcgttctgagcgggctggcaaggc

SEQ ID NO: 2207 - DNA, 495 bp, Artificial Sequence
  source: /note="Description of Artificial Sequence: Synthetic polynucleotide"
gcctccctcgcgccatcagtaggagacctataaggcagaaatgcagcaaaacccttcagagttaaagcaggagagaggttgtgaggactcacctgaggagacggtgaccagggttccctggccccagtagtcaaagtcgactaggagacctataaggtcaacagtaatacacggctgtgtcctcggttttcaggctgttcatttgcagataggcgatgcttttggaatcatctcttgagatggtgaatctgcctttcacagacgcggcgtattctgttgtcccaccataagctttgcttctaatgaaacctacccactccagccccttccctggagcctggcggaaccagctcatagcataatcaccaaaggtgaatccagaagctgtacaggagagtctcagggaccgccctggctgtaccaagcctcccccagactccaccagctgcacctcacattgtaggagacctataaggctgagcgggctggcaaggc

SEQ ID NO: 2208 - DNA, 495 bp, Artificial Sequence
  source: /note="Description of Artificial Sequence: Synthetic polynucleotide"
gcctccctcgcgccatcagtaggagactcttagtccagaaatgcagcaaaacccttcagagttaaagcaggagagaggttgtgaggactcacctgaggagacggtgaccagggttccctggccccagtagtcaaagtcgactaggagactcttagtctcaacagtaatacacggccgtgtcctcggctctcaggctgttcatttgaagatacagcgtgttcttggaattgtctctggagatggtgaatcggcccttcacggagtctgcgtagtatgtgctaccaccgctataaataactgagacccactccagccccttccctggagcctggcggacccagctcatgtagttgctactgacggtgaacccagaggctgcacaggagagtctcagggaccccccaggctggatcaagcctcctccagactccaccagctgcacctcacactggacacctgctaggagactcttagtcctgagcgggctggcaaggc

SEQ ID NO: 2209 - DNA, 495 bp, Artificial Sequence
  source: /note="Description of Artificial Sequence: Synthetic polynucleotide"
gcctccctcgcgccatcagtaggagactgtctgcacagaaatgcagcaaaacccttcagagttaaagcaggagagaggttgtgaggactcacctgaggagacggtgaccagggttccctggccccagtagtcaaagtcgactaggagactgtctgcatcaacagtaatacacagccatgtcctcagctctcaggctgcccatttgaagatacagcgtgttcttggaattgtctctggagatggtgaatctgcccttcacagagtctgcataatatgtgctacccccattactactaatagctgaaacatattccagtcccttccctggagcctggcggacccagtgcatagcatagctactgaaggtgaatccagaggctgcacaggagagtctcagggaccccccaggctggaccaagccttccccagactccaccagctgcacctcacactggacacctaggagactgtctgcactgagcgggctggcaaggc

SEQ ID NO: 2210 - DNA, 495 bp, Artificial Sequence
  source: /note="Description of Artificial Sequence: Synthetic polynucleotide"
gcctccctcgcgccatcagtaggagacgccattaacagaaatgcagcaaaacccttcagagttaaagcaggagagaggttgtgaggactcacctgaggagacggtgaccagggttccctggccccagtagtcaaagtcgactaggagacgccattaatcaacagtaatacacagccgtgtcctcagctctcaggctgttcatttgaagatacagcgtgttcttggaattgtctctggagatggtgaatcggcccttcacggagtctgcgtagtatgtgctaccacagctataaataactgagacccactccagccccttccctggagcctggcggacccagctcatgtagttgctactgacggtgaacccagaggctgcacaggagagtctcagggaccccccaggctggatcaagcctcctccagactccaccagctgcacctcacactggacacctgctaggagacgccattaactgagcgggctggcaaggc

SEQ ID NO: 2211 - DNA, 495 bp, Artificial Sequence
  source: /note="Description of Artificial Sequence: Synthetic polynucleotide"
gcctccctcgcgccatcagtaggagacgactaagacagaaatgcagcaaaacccttcagagttaaagcaggagagaggttgtgaggactcacctgaggagacggtgaccagggttccctggccccagtagtcaaagtcgactaggagacgactaagatcaacagtaatacacggccgtgtcctcggttttcaggctgttcatttgcagatacagtgagttctttgaatcatctcttgagatggtgaatctgcctttcacagacgcggcgtattctgtggtgtaactgttagctttgtttctagtacggccaacccactccagccccttccctggagcctggcggacccagtccatgtagtggtcactgaaggtgaatccagaggctgcacaggagagtctcagggaccctccaggctggaccaagcctcccccagactccaccagctgcacctcacactgtaggagacgactaagactgagcgggctggcaaggc

SEQ ID NO: 2212 - DNA, 495 bp, Artificial Sequence
  source: /note="Description of Artificial Sequence: Synthetic polynucleotide"
gcctccctcgcgccatcagtaggagacaggttgctcagaaatgcagcaaaacccttcagagttaaagcaggagagaggttgtgaggactcacctgaggagacggtgaccagggttccctggccccagtagtcaaagtcgactaggagacaggttgcttcaacagtaatacacggccgtgtcctcggttttcaggctgttcatttgcagatacgccgtgttctttgaatcatctctggagatggtgaacctgcctttcaccgacgcagcatatgctgtcgcgtaactgttagctttgcttctaatacggccaacccactccagccctttcccggaagcctggcggacccagtgcatagcagagccactgaaggtgaacccagaggctgcacaggagagtttcagggaccccccaggctggaccaagcctcccccggactccaccagctgcacctcacactgtaggagacaggttgctctgagcgggctggcaaggc

SEQ ID NO: 2213 - DNA, 495 bp, Artificial Sequence
  source: /note="Description of Artificial Sequence: Synthetic polynucleotide"
gcctccctcgcgccatcagtaggagacctcgagaacagaaatgcagcaaaacccttcagagttaaagcaggagagaggttgtgaggactcacctgaggagacggtgaccagggttccctggccccagtagtcaaagtcgactaggagacctcgagaatcaacagtaatacacagccgtgtcctcggctctcagactgttcatttgcagatacagcgtgttcttggcgttgtctctggagatggtgaatcggcccttcacggagtccgcgtagcttgtgctactcccatcactattaatacgtgagacccacaccagccccttccctggagcttggcggacccagtgcatccagtagctactgaaggtgaatccagaggctgcacaggagagtctcagggaccccccaggctgaactaagcctcccccggactccaccagctgcacctcacactggacacctaggagacctcgagaactgagcgggctggcaaggc

SEQ ID NO: 2214 - DNA, 495 bp, Artificial Sequence
  source: /note="Description of Artificial Sequence: Synthetic polynucleotide"
gcctccctcgcgccatcagtaggagacttaatggccagaaatgcagcaaaacccttcagagttaaagcaggagagaggttgtgaggactcacctgaggagacggtgaccagggttccctggccccagtagtcaaagtcgactaggagacttaatggctcaacagtaatacacagccgtgtcctcagctctcaggctgttcatttgcagatacagcgtgttcttggaattgtctctggagatggtgaatcggcccttcacggagtctgcatagtatttattacttccatcataccgtataaatgccacccactccagccccttgcctggagcctggcggacccagtgcatgccatagctactgaaggtgaatccagacgctgcacaggagagtctcagggaccccccaggctggaccacgcctcccccagactccaccagctgcacctgacactggacacctaggagacttaatggcctgagcgggctggcaaggc

SEQ ID NO: 2215 - DNA, 495 bp, Artificial Sequence
  source: /note="Description of Artificial Sequence: Synthetic polynucleotide"
gcctccctcgcgccatcagtaggagactgcagacacagaaatgcagcaaaacccttcagagttaaagcaggagagaggttgtgaggactcacctgaggagacggtgaccagggttccctggccccagtagtcaaagtcgactaggagactgcagacatcaacagtaatacacagccgtgtcctcagctctcaggctgttcatttgaagatgcagcgtgttcttggaattgtctctggagatggtgaatctgcccttcctggagtctgcgtagtatgtgctaccaccactaatggatgagacccactccagacccttccctggagcctggcggacccagctcatctcattgctactgacggtgaatccagaggctgcacaggagagtctcagggaccccccaggctgtaccaagactccccgagactccaccagctgcacctcacactggacacctgcaaataggagactgcagacactgagcgggctggcaaggc

SEQ ID NO: 2216 - DNA, 495 bp, Artificial Sequence
  source: /note="Description of Artificial Sequence: Synthetic polynucleotide"
gcctccctcgcgccatcagtaggagactcactgagcagaaatgcagcaaaacccttcagagttaaagcaggagagaggttgtgaggactcacctgaggagacggtgaccagggttccctggccccagtagtcaaagtcgactaggagactcactgagtcaacagtaatacacggccgtgtccgcggcggtcacagagctcagcttcagggagaactggttcttggacgtgtctactgacatggtgactcgactcttgagggaggggttgtagttggtgctcccactggtatagatacgcccaatccactccagtcccttcccggcgggctgccggatccagctccagtagtaactactgatggagccaccagagacagtgcaggtgagggacagggtctccgaaggcttcaccagtcctgggcccgactcctgcagctgcacctgggacaggacccctgttaggagactcactgagctgagcgggctggcaaggc

SEQ ID NO: 2217 - DNA, 495 bp, Artificial Sequence
  source: /note="Description of Artificial Sequence: Synthetic polynucleotide"
gcctccctcgcgccatcagtaggagacgagtacgtcagaaatgcagcaaaacccttcagagttaaagcaggagagaggttgtgaggactcacctgaggagacggtgaccagggttccctggccccagtagtcaaagtcgactaggagacgagtacgttcaacagtaatacacggccgtgtccacggcggtcacagagctcagcttcagggagaactggttcttggacgtgtctactgacatggtgactcgactcttgagggacgggttgtagtaggtgctcccactataatagatgtacccaatccactccagtcccttccctgggggctgccggatccagccccaccagttactactgctgatggagtaaccagagacagcgcaggtgagggacagggtgtccgaaggcttcaccagtcctgggcccgactcctgcagctgcacctgggacaggaccactaggagacgagtacgtctgagcgggctggcaaggc

SEQ ID NO: 2218 - DNA, 495 bp, Artificial Sequence
  source: /note="Description of Artificial Sequence: Synthetic polynucleotide"
gcctccctcgcgccatcagtaggagacatacgccacagaaatgcagcaaaacccttcagagttaaagcaggagagaggttgtgaggactcacctgaggagacggtgaccagggttccctggccccagtagtcaaagtcgactaggagacatacgccatcaacagtaatacacggccgtgtccgcggcggtcacagagctcagcttcagggagaactggttcttggacctgtctactgatatggtgactcgactcttgagggacgggttgtagtaggtgctcccactatgatagatgtacccaatccactccaggcccttccctggtggctgccggatccagctccaggagtaaccaccactgctgatggagccaccagagacagcgcaggtgagggacagggtctgtgaaggcttcaccagtcctgagccggactcctgcagctgcagctgggacaggactaggagacatacgccactgagcgggctggcaaggc

SEQ ID NO: 2219 - DNA, 495 bp, Artificial Sequence
  source: /note="Description of Artificial Sequence: Synthetic polynucleotide"
gcctccctcgcgccatcagtaggagactcgcatcacagaaatgcagcaaaacccttcagagttaaagcaggagagaggttgtgaggactcacctgaggagacggtgaccagggttccctggccccagtagtcaaagtcgactaggagactcgcatcatcaacagtaatacacggccgtgtctgcggcagtcacagagctcagcttcagggagaactggttcttggacgtgtctactgatatggtaactcgactcttgagggacgggttgtagtaggtgctcccactgtaatagatgtacccaatccactccaggcccttccctgggggctggcggatccaactccagtagtaatcaccactgctgatggagccaccagagacagtgcaggtgagggacagggtctgtgaaggcttcaccagtcctgggcccgactcctgcagctgcacctgggacaggactaggagactcgcatcactgagcgggctggcaaggc

SEQ ID NO: 2220 - DNA, 495 bp, Artificial Sequence
  source: /note="Description of Artificial Sequence: Synthetic polynucleotide"
gcctccctcgcgccatcagtaggagaccgcttaatcagaaatgcagcaaaacccttcagagttaaagcaggagagaggttgtgaggactcacctgaggagacggtgaccagggttccctggccccagtagtcaaagtcgactaggagaccgcttaattcaacagtaatacacggccgtgtccgcggcagtcacagagctcagcttcagggagaactggttcttagacgtgtctactgatatggtaactcgactcttgagggacgggttgtagtaggtgctcccactgtaatagatgtacccaatccactccaggcccttccctgggtgctggcggatccagctccagtagtaaccaccactgctgatggagccaccagagacagtacaggtgagggacagggtctgtgaaggcttcaccagtcctgggcccgactcctgcagctgcacctggggcaggactaggagaccgcttaatctgagcgggctggcaaggc

SEQ ID NO: 2221 - DNA, 495 bp, Artificial Sequence
  source: /note="Description of Artificial Sequence: Synthetic polynucleotide"
gcctccctcgcgccatcagtaggagactggttatccagaaatgcagcaaaacccttcagagttaaagcaggagagaggttgtgaggactcacctgaggagacggtgaccagggttccctggccccagtagtcaaagtcgactaggagactggttatctcaacagtaatacacagccgtgtccgcggcggtcacagagctcagcttcagggagaactggttcttggacgtgtctactgatatggtgactcgactcttgagggacgggttgtagttggtgcttccactatgattgatttccccaatccactccagccccttccctgggggctggcggatccagctccagtagtaaccactgaaggacccaccatagacagcgcaggtgagggacagggtctccgaaggcttcaacagtcctgcgccccactgctgtagctgcacctgggacaggacccctgttaggagactggttatcctgagcgggctggcaaggc

SEQ ID NO: 2222 - DNA, 495 bp, Artificial Sequence
  source: /note="Description of Artificial Sequence: Synthetic polynucleotide"
gcctccctcgcgccatcagtaggagacggattgctcagaaatgcagcaaaacccttcagagttaaagcaggagagaggttgtgaggactcacctgaggagacggtgaccagggttccctggccccagtagtcaaagtcgactaggagacggattgcttcaacagtaatacacagccgtgtctgcggcggtcacagagctcagcttcagggagaactggttcttggacgtgtctacggatatggtgactcgactcttgagggacgggttgtagtaggtgctcccactataatagatactcccaatccactccagccccttccctgggggctggcggatccagccccagtagtaactactactgctgatggagccaccagagacagtgcaggtgagggacagggtctccgaaggcttcaccagtcctgggcccgactcctgcagctgcagctgggacaggactaggagacggattgctctgagcgggctggcaaggc

SEQ ID NO: 2223 - DNA, 495 bp, Artificial Sequence
  source: /note="Description of Artificial Sequence: Synthetic polynucleotide"
gcctccctcgcgccatcagtaggagacctcagtgacagaaatgcagcaaaacccttcagagttaaagcaggagagaggttgtgaggactcacctgaggagacggtgaccagggttccctggccccagtagtcaaagtcgactaggagacctcagtgatcaacagtaatacacggccgtgtccgcagcggtcacagagctcagcttcagggagaactggttcttggacgtgtctactgatatggtgactcgactcttgagggaggggttgtagttggtgctcccactgtaatagatatacccaatccactccagtcccttccctgggggctgccggatccagctccagtagtaactactgatggagccaccagagacagtgcaggtgagggacagggtctccgaaggcttcaccagtcctgggcccgactcctgcagctgcacctgggacaggacccctgttaggagacctcagtgactgagcgggctggcaaggc

SEQ ID NO: 2224 - DNA, 495 bp, Artificial Sequence
  source: /note="Description of Artificial Sequence: Synthetic polynucleotide"
gcctccctcgcgccatcagtaggagacacgtactccagaaatgcagcaaaacccttcagagttaaagcaggagagaggttgtgaggactcacctgaggagacggtgaccagggttccctggccccagtagtcaaagtcgactaggagacacgtactctcaacagtaatacacggccgtgtccgcagcggtcacagagctcagcttcagggagaactggttcttggacgtgtctactgatatggtgactcgactcttgagggaggggttgtagttggtgctcccactgtaatagatatacccaatccactccagtcccttccctgggggctgccggatccagctccagtagtaaccaccactgctgacggagccaccagagacagtgcaggtgagggacagggtctccgaaggcttcaccagtcctgggcccgactcctgcagctgcacctgggacaggactaggagacacgtactcctgagcgggctggcaaggc

SEQ ID NO: 2225 - DNA, 495 bp, Artificial Sequence
  source: /note="Description of Artificial Sequence: Synthetic polynucleotide"
gcctccctcgcgccatcagtaggagactgatgcgacagaaatgcagcaaaacccttcagagttaaagcaggagagaggttgtgaggactcacctgaggagacggtgaccagggttccctggccccagtagtcaaagtcgactaggagactgatgcgatcaacagtaatacacggccgtgtctgcggcggtcacagagctcagcttcagggagaactggttcttggacgtgtctactgatatggtgactcgactcttgagggacgggttgtagtaggtgctcccactatgatagatactcccaatccactccagccccttccctgggggctgccggatccagccccagtagtaaccactgctgatggagtaaccagagacagcgcaggtgagggacagggtctccgaaggcttcaccagtcctgggcccgactcctgcagctgcacctgggacaggacccctaggagactgatgcgactgagcgggctggcaaggc

SEQ ID NO: 2226 - DNA, 495 bp, Artificial Sequence
  source: /note="Description of Artificial Sequence: Synthetic polynucleotide"
gcctccctcgcgccatcagtaggagacattaagcgcagaaatgcagcaaaacccttcagagttaaagcaggagagaggttgtgaggactcacctgaggagacggtgaccagggttccctggccccagtagtcaaagtcgactaggagacattaagcgtcaacagtaatacatggcggtgtccgaggccttcaggctgctccactgcaggtaggcggtgctgatggacttgtcggctgagatggtgacctggccttggaaggacgggctgtatctggtatcagagtcaccaggatagatgatccccatccactccaggcctttcccgggcatctggcgcacccagccgatccagtagctggtaaagctgtatccagaacccttacaggagatcttcagagactccccgggctttttcacctctgctccagactgcaccagctgcacctcggcacagactcctaggagacattaagcgctgagcgggctggcaaggc

SEQ ID NO: 2227 - DNA, 495 bp, Artificial Sequence
  source: /note="Description of Artificial Sequence: Synthetic polynucleotide"
gcctccctcgcgccatcagtaggagacagcaatcccagaaatgcagcaaaacccttcagagttaaagcaggagagaggttgtgaggactcacctgaggagacggtgaccagggttccctggccccagtagtcaaagtcgactaggagacagcaatcctcaacagtaatacatggcggtgtccgaggccttcaggctgctccactgcaggtaggcagtgctgatggacttgtcagctgagatggtgacgtggccttggaaggacgggctgtagttggtataagagtcactaggatcaatcctccccatccactccaagcctttcccgggcatctggcgcacccagctgatccagtagctggtaaagctgtatccagaacccttacaggagatcctcagagactccccgggctttttcacctctgctccagactgcaccagctgcacttcggcacagactcctaggagacagcaatccctgagcgggctggcaaggc

SEQ ID NO: 2228 - DNA, 495 bp, Artificial Sequence
  source: /note="Description of Artificial Sequence: Synthetic polynucleotide"
gcctccctcgcgccatcagtaggagacgcttagtacagaaatgcagcaaaacccttcagagttaaagcaggagagaggttgtgaggactcacctgaggagacggtgaccagggttccctggccccagtagtcaaagtcgactaggagacgcttagtatcaacagtaatacacagccgtgtcctcgggagtcacagagttcagctgcagggagaactggttcttggatgtgtctgggttgatggttattcgacttttcacagatactgcataatcattataccacttggacctgtagtatgtccttcccagccactcaaggcctctcgatggggactgcctgatccagttccaagcagcactgttgctagagacactgtccccggagatggcacaggtgagtgagagggtctgcgagggcttcaccagtcctggacctgactgctgcagctgtacctgtgataggagacgcttagtactgagcgggctggcaaggc

SEQ ID NO: 2229 - DNA, 495 bp, Artificial Sequence
  source: /note="Description of Artificial Sequence: Synthetic polynucleotide"
gcctccctcgcgccatcagtaggagactgaccttgcagaaatgcagcaaaacccttcagagttaaagcaggagagaggttgtgaggactcacctgaggagacggtgaccagggttccctggccccagtagtcaaagtcgactaggagactgaccttgtcaacagtaatacacggcagtgtcctcagcctttaggctgcagatctgcagatatgccgtgctgacagaggtgtccaaggagaagacaaaccgtcctgtgaagccctgggcatacgttgggttcccagtgttggtgttgatccatcccatccactcaagcccttgtccaggggcctgtcgcacccaattcatagcatagctagtgaaggtgtatccagaagccttgcaggaaaccttcactgaggccccaggcttcttcaactcagacccagattgcaccagctgcacctgggagtgggcacctaggagactgaccttgctgagcgggctggcaaggc

SEQ ID NO: 2230 - DNA, 495 bp, Artificial Sequence
  source: /note="Description of Artificial Sequence: Synthetic polynucleotide"
gcctccctcgcgccatcagtaggagaccaaggtcacagaaatgcagcaaaacccttcagagttaaagcaggagagaggttgtgaggactcacctgaggagacggtgaccagggttccctggccccagtagtcaaagtcgactaggagaccaaggtcatcaacagtaatacatggccatgtcctcagcctttaggctgctgatctgcaggtatgctgtgctggcagaggtgtccatggagaagacaaaccgtcctgtgaagccctgggcatatgttgggttcccagtgtaggtgttgaaccatcccatccactcaagcccttgtccaggggcctgtggcacccaattcataccataggtggtgaaactgtaaccagaagccttgcaggagaccttcactgaggccccaggctgcttcacctcatggccagactgcaccagctgcacctgggagtaggtacctaggagaccaaggtcactgagcgggctggcaaggc

SEQ ID NO: 2231 - DNA, 495 bp, Artificial Sequence
  source: /note="Description of Artificial Sequence: Synthetic polynucleotide"
gcctccctcgcgccatcagtaggagaccactgtaccagaaatgcagcaaaacccttcagagttaaagcaggagagaggttgtgaggactcacctgaggagacggtgaccagggttccctggccccagtagtcaaagtcgactaggagaccactgtactcagggaatgtgcggccctgcccttggccatcacggagctcagctgcagggataactgggccttggatgtgtctctacagatggagagttggcccagaaaggctgggctgaagtgtgtgctgcccctggagctgaggtgccccagcgccttcccagagggctgctgggtccaggcccagaggtctgtgaggacctcaccagccctgggcatgactccagtagctgcatctgatgcaggacactcagggacaagaagcaaagagatgagtcacaagcggacaccacagcccacagcccccgttctaggagaccactgtacctgagcgggctggcaaggc

SEQ ID NO: 2232 - DNA, 495 bp, Artificial Sequence
  source: /note="Description of Artificial Sequence: Synthetic polynucleotide"
gcctccctcgcgccatcagtaggagacgatgatcccagaaatgcagcaaaacccttcagagttaaagcaggagagaggttgtgaggactcacctgaggagacggtgaccagggttccctggccccagtagtcaaagtcgactaggagacgatgatcctcagtataaaaatccatggtggtttactcattgtgcgggtagctcagctgtaggaaaaactgttttctgaatgtggatctggaggtggtgactggactcttgagaagcgggttgcactgtgtgtttcctcgtgacctacacacctgacccacttcagcttcttccctgggggctggcagatacagctccaggaggaagtactggttatgattggaaatccagagacagcacaggtgaaggagagggtctctgagggctttactagaacatgagtgcactgaaaaacacaatttttttcataggtaggagacgatgatccctgagcgggctggcaaggc

SEQ ID NO: 2233 - DNA, 495 bp, Artificial Sequence
  source: /note="Description of Artificial Sequence: Synthetic polynucleotide"
gcctccctcgcgccatcagtaggagaccgccaatacagaaatgcagcaaaacccttcagagttaaagcaggagagaggttgtgaggactcacctgaggagacggtgaccagggttccctggccccagtagtcaaagtcgactaggagaccgccaatatcaataaaaatcatggttgtgtactccttgttaaggtagctcagctgtaggagaaactgttttttggatgtggatctggagatggtgactggactcttgaggagtgggttggattgtgcactccctcatgacctgtgcacctgattcgctccagtcccttccccggggggtgacggatccagctccagcaggaagcactggttgtaatggagaagcagagatgccacaggccagggggaggatctgtgagggcttcaccaggccaggagtgcaccgagaatcacagttgtcggcatgcacaggtaggagaccgccaatactgagcgggctggcaaggc

SEQ ID NO: 2234 - DNA, 495 bp, Artificial Sequence
  source: /note="Description of Artificial Sequence: Synthetic polynucleotide"
gcctccctcgcgccatcagtaggagactcaagcctcagaaatgcagcaaaacccttcagagttaaagcaggagagaggttgtgaggactcacctgaggagacggtgaccagggttccctggccccagtagtcaaagtcgactaggagactcaagccttcacagtaatactcagccgtgtcctaggtggtcatggagctgagcttcacagagaactggctcttggttgagtcactgttgatggggacatggacctgggtggagggtgcatgatgtgtattccttgatgatccagtctagtaactgtgccccagccattccagcctgttgcccacgggatggtggattcatctcaaataatatccatggtaaaaaaaagaatccagacacagcacaggcagagggcagtgtctgagggcctcatgggtcctggacctgactcctgcagctgcacctgggacataggagactcaagcctctgagcgggctggcaaggc

SEQ ID NO: 2235 - DNA, 495 bp, Artificial Sequence
  source: /note="Description of Artificial Sequence: Synthetic polynucleotide"
gcctccctcgcgccatcagtaggagacacgtgtgtcagaaatgcagcaaaacccttcagagttaaagcaggagagaggttgtgaggactcacctgaggagacggtgaccagggttccctggccccagtagtcaaagtcgactaggagacacgtgtgttcacttaaaaatgcgtagttgtgtgttcactgggcacagagctcagctgtaagaactgtttcttggatctggatatggactcttgagcagtgggttgtaatttgtgctcccttcacaacccatgcacctgatccactcctgtccatcttctaggggcaagcagatacaattctagcaggaaacactggttatgatggggaatccagagacagtgcaggtgaggagagggtctgcaaggagtctcaagccagaagtgtgctgagaaacatagttgttgatgttaacaggttctgggcaacacagtaggagacacgtgtgtctgagcgggctggcaaggc

SEQ ID NO: 2236 - DNA, 495 bp, Artificial Sequence
  source: /note="Description of Artificial Sequence: Synthetic polynucleotide"
gcctccctcgcgccatcagtaggagactccgtctacagaaatgcagcaaaacccttcagagttaaagcaggagagaggttgtgaggactcacctgaggagacggtgaccagggttccctggccccagtagtcaaagtcgactaggagactccgtctatcagctctaaaatacatggctatgtgtttgttcctcacatagttcagctgtaagaagaactactttttggacatggatctggagatggtgactggactcttgagaagaggggagtaatttgtgctccctccatgacctatgcacccgatccactccagtacctcccatgggggcgctgatggatgcagctccagcaggaaacactggttgtgatggagaatgcagagatggcacaggtgagggagaggttctgtgaaggcttcaccaggccaagagtgcaccgagaaatacagttgttggcagtaggagactccgtctactgagcgggctggcaaggc

SEQ ID NO: 2237 - DNA, 495 bp, Artificial Sequence
  source: /note="Description of Artificial Sequence: Synthetic polynucleotide"
gcctccctcgcgccatcagtaggagacaagagctgcagaaatgcagcaaaacccttcagagttaaagcaggagagaggttgtgaggactcacctgaggagacggtgaccagggttccctggccccagtagtcaaagtcgactaggagacaagagctgtcattcaaaatgtgtagttgtgtgttcactgggcacagagctcagctgtaagaactgtttcttggatctggatatggactcttgagaagtgggatgtaatttttgctccctttacaacccatgaacctgatccactcctgtccatcttctaggggcaagcagatacaattctagcaggacacactggttatgatggggaatccagagacagtgcaggtgagggagagggtctgtgaggatgtctcaagccagaagtgcactggaaaacacagttgttgatgttaacagtttctggacaacacgtaggagacaagagctgctgagcgggctggcaaggc

SEQ ID NO: 2238 - DNA, 495 bp, Artificial Sequence
  source: /note="Description of Artificial Sequence: Synthetic polynucleotide"
gcctccctcgcgccatcagtaggagactatcgctccagaaatgcagcaaaacccttcagagttaaagcaggagagaggttgtgaggactcacctgaggagacggtgaccagggttccctggccccagtagtcaaagtcgactaggagactatcgctctcagctctaaaatacatggctatgtgtttgttgctcacatagttcacctgtaagaagaagtactttttggacatggatctggagatggtgactggactcttgagaagaggggagtaatctgtgctccctccatgacctatgcacccgatccactccagtacctcccatgggggcgctgatggatgcagctccagaaggaaacactggttgtgatggagaatgcagagatggcacaggtgagggagaggttctgtgaaggcttcaccaggccaagagtgcaccgagaaatacagttgttggcagtaggagactatcgctcctgagcgggctggcaaggc

SEQ ID NO: 2239 - DNA, 495 bp, Artificial Sequence
  source: /note="Description of Artificial Sequence: Synthetic polynucleotide"
gcctccctcgcgccatcagtaggagactcagatgccagaaatgcagcaaaacccttcagagttaaagcaggagagaggttgtgaggactcacctgaggagacggtgaccagggttccctggccccagtagtcaaagtcgactaggagactcagatgctcatgaaagaagaattcatgtgcagacacatctgcttgtctgaagatatagtgcatgtgggaacatgtgggcttgtctgaattcatgataagtgggctggaattcatcctccactcatcacgtatgcacctgacccactcctgtgctttccatccagtgcctacaggaagcactgattgtgacagagaatccagaggcagcacaggtgagtgagggggtttgcaagggcttcaccaggctgataattgactgagaaaaacagttgttagcatgcacaagttctggatgatacattggaaaccctaggagactcagatgcctgagcgggctggcaaggc

SEQ ID NO: 2240 - DNA, 495 bp, Artificial Sequence
  source: /note="Description of Artificial Sequence: Synthetic polynucleotide"
gcctccctcgcgccatcagtaggagacgtgtagcacagaaatgcagcaaaacccttcagagttaaagcaggagagaggttgtgaggactcacctgaggagacggtgaccagggttccctggccccagtagtcaaagtcgactaggagacgtgtagcatcaacagtaatacaaaccatgtcctcagatgtcacagagctcaggtatagtcaaaattgtttcttggatgaatctctggagaaggagagttggctctgcagagatggatcatcgtgtgtgtcacccttgcaatgtgttcctgacagcccatggaagcgggctagtggattcagctccagcagtaactgttggttgggatggacaacccagaaatggggcatgtgaggaagagaaaatgaaagtggatagcctgttaccgaaaactgctggactaagacacttgtaagcctgtcaatctcagtgtaggagacgtgtagcactgagcgggctggcaaggc

SEQ ID NO: 2241 - DNA, 495 bp, Artificial Sequence
  source: /note="Description of Artificial Sequence: Synthetic polynucleotide"
gcctccctcgcgccatcagtaggagactggcagttcagaaatgcagcaaaacccttcagagttaaagcaggagagaggttgtgaggactcacctgaggagacggtgaccagggttccctggccccagtagtcaaagtcgactaggagactggcagtttcacagccaagatatggaaactaagtgtctgtcaatgggcaaatggataaagacaatgtggtatgtgtacacaacatagcattattatgccttataaaataaggaaatgctgccattttccacaagacaaatggactcccaccaccactagcaatggattttatccattgcagcccctccctgagagccggcagatccaggtccactagtaaggactggttgtgacggagtggccagtaacagtgtaggtgaggcagagggtaagtgtgtgctattcaggtccagggctgactcctgcagctgtaggagactggcagttctgagcgggctggcaaggc

SEQ ID NO: 2242 - DNA, 495 bp, Artificial Sequence
  source: /note="Description of Artificial Sequence: Synthetic polynucleotide"
gcctccctcgcgccatcagtaggagaccagtccaacagaaatgcagcaaaacccttcagagttaaagcaggagagaggttgtgaggactcacctgaggagacggtgaccagggttccctggccccagtagtcaaagtcgactaggagaccagtccaatcagtgtaaaaattcatggttgtgtactcgttgctcaggtagctcagctgtagaagaaactgtgttttggatgtggatctggagatggtgactggactcttgaggcgtgggttgcgttgtgttctccctcatgacctgtgcacctgattcactccagtcccttccctggggagctgagggatccagctccagcaggaagcactggttgtgatggagaagcagagacagcacagatgagggagagggtctgtgagggcttcgccaggccaagaacgcacgagaaatacagatgtcggcatgcactaggagaccagtccaactgagcgggctggcaaggc

SEQ ID NO: 2243 - DNA, 495 bp, Artificial Sequence
  source: /note="Description of Artificial Sequence: Synthetic polynucleotide"
gcctccctcgcgccatcagtaggagacgtgtctaccagaaatgcagcaaaacccttcagagttaaagcaggagagaggttgtgaggactcacctgaggagacggtgaccagggttccctggccccagtagtcaaagtcgactaggagacgtgtctactcaagtaatacaaggttgtggcattgttggtcacagaactcagctaaaagaaaatttggttcttggacgtggatctggagatggtgactgagctcatgaggagtgggttagaatttgtgctccctcgtgacctatgccctgatccactcccttgactgaggactggcggatccagctccagcaggaagcactagttgtgatggagaatccagagacagcacaggtgagggagggggtctgtgagggcctcaccaggccaataaatgaccatgaaacacagtggttggtgtgcatggcttctggtaggagacgtgtctacctgagcgggctggcaaggc

SEQ ID NO: 2244 - DNA, 495 bp, Artificial Sequence
  source: /note="Description of Artificial Sequence: Synthetic polynucleotide"
gcctccctcgcgccatcagtaggagacgtacagtgcagaaatgcagcaaaacccttcagagttaaagcaggagagaggttgtgaggactcacctgaggagacggtgaccagggttccctggccccagtagtcaaagtcgactaggagacgtacagtgtcataaaaatacatggctgtgtgcttgtgactcacttagctcggctgtaggaagaactgctttttggacatggatctggagatggtgactggactcttgaggagtgggttggaatgtgcactccctcatgacctgtgcactggattcactccagtcccttcctggggggtttatgaatgcagctacagcaggaagcactggttgtgatggggaatccagagacagcacaggtgagggagagggtctgtgagggcttcaccaggccaagtgggcactgagaaacacagttgttggcatgcacagtaggagacgtacagtgctgagcgggctggcaaggc

SEQ ID NO: 2245 - DNA, 495 bp, Artificial Sequence
  source: /note="Description of Artificial Sequence: Synthetic polynucleotide"
gcctccctcgcgccatcagtaggagacggatcatccagaaatgcagcaaaacccttcagagttaaagcaggagagaggttgtgaggactcacctgaggagacggtgaccagggttccctggccccagtagtcaaagtcgactaggagacggatcatctcatttaaaacatggctgtgagcttgttgctcacatagctccactgtaaaaacaagtgttttttggacccgaatttggagatggtgactggattcataaggagtgggtgggaatttttgctcccttcatgacgtgtgcgcctggtccactccagtccttcccatgtggactcgtggatccagctccagcaggaaacactggttgtgatggaaaatccagagacagcacaggtgagggagagggtctgcgagggctccaccaggccaagagtgcactaagaaacacagttgtttgtgagcacagtaggagacggatcatcctgagcgggctggcaaggc

SEQ ID NO: 2246 - DNA, 495 bp, Artificial Sequence
  source: /note="Description of Artificial Sequence: Synthetic polynucleotide"
gcctccctcgcgccatcagtaggagactattggcgcagaaatgcagcaaaacccttcagagttaaagcaggagagaggttgtgaggactcacctgaggagacggtgaccagggttccctggccccagtagtcaaagtcgactaggagactattggcgtcatgaaaaatatatggctatgtgattgttgctcatgtagctcagctgtaggaagaactgtttttggacatggatctggggatggtgactggactcttgaggaaaggggagtaatgtgtgctcccttcatcatctatggacccaatccactccattccctcccagagagggggtgatggatgcagatccaggaggaagcactggttgtgatggagaatgcagagatgacacacatgagggagagggtctttgggggcttcaccaggccaagagtgcaccgagaaacacagttgttggcaggcataggagactattggcgctgagcgggctggcaaggc

SEQ ID NO: 2247 - DNA, 495 bp, Artificial Sequence
  source: /note="Description of Artificial Sequence: Synthetic polynucleotide"
gcctccctcgcgccatcagtaggagacaggcttgacagaaatgcagcaaaacccttcagagttaaagcaggagagaggttgtgaggactcacctgaggagacggtgaccagggttccctggccccagtagtcaaagtcgactaggagacaggcttgatcaattaaaattcatggttgtgtacttgttgctcaggtagctcagctacaggaaacactgttttttggatgtggatctggagatagtgactggactcttgaggagtgggttggaatgtgcactccctcatgacctgtgcacctgattcgctccagtcccttccttgcggggggtgatggatgcagctccagcaggaagcactggttgtgatggagaatgcagagacagcacaggtgagagagagggtctgtgagagcttcactagcccaagagtgcaggagaaacacagttgttggcatgcactaggagacaggcttgactgagcgggctggcaaggc

SEQ ID NO: 2248 - DNA, 495 bp, Artificial Sequence
  source: /note="Description of Artificial Sequence: Synthetic polynucleotide"
gcctccctcgcgccatcagtaggagacacacacgtcagaaatgcagcaaaacccttcagagttaaagcaggagagaggttgtgaggactcacctgaggagacggtgaccagggttccctggccccagtagtcaaagtcgactaggagacacacacgttcagcttaaaaatacatggctatgtgcttgttgctcatgtagctcagctgtaggaagaactgcttttttggacacggatctggggatggtgactggacacttgaggagtgggtggtaatgtgtgctcccttcatgacctatgcacccaatccactccattcccttccctggggggctgatggatccagcttcagcaggaagacctcgttatcacggggaacacagacacagcgcaggtaagggagagggtctgtgagggcttcaccaggccaagagtgcgctgagaaacacagttgttggcattaggagacacacacgtctgagcgggctggcaaggc

SEQ ID NO: 2249 - DNA, 495 bp, Artificial Sequence
  source: /note="Description of Artificial Sequence: Synthetic polynucleotide"
gcctccctcgcgccatcagtaggagactagacggacagaaatgcagcaaaacccttcagagttaaagcaggagagaggttgtgaggactcacctgaggagacggtgaccagggttccctggccccagtagtcaaagtcgactaggagactagacggatcaagtaatacatgaccttgtccttggctttcagattggtcattgtaaggcagactgcacttaaaagggtgttgcttgagattgttaatttatttgtactcatggaaagtaaccctgagaattcatacttgatcactcactgttggcacccacacctatccctgttgtgaagcgtgctggaccaagctcatgctgtaaccagtaaaggtgaaaccagaggctttgcaggagagtctcaccactgggctgtaaattttttccccctctgactccatcagtaaacttcacacaggacttccgtgataggagactagacggactgagcgggctggcaaggc

SEQ ID NO: 2250 - DNA, 495 bp, Artificial Sequence
  source: /note="Description of Artificial Sequence: Synthetic polynucleotide"
gcctccctcgcgccatcagtaggagacgagcgatacagaaatgcagcaaaacccttcagagttaaagcaggagagaggttgtgaggactcacctgaggagacggtgaccagggttccctggccccagtagtcaaagtcgactaggagacgagcgatatcaagtaatacactgcctactcctcagctttccagtagataattttaagggagattgtgatgttaagtgttgtccccaggaactgtgaatcttctttgtgctggagcagagcaccactgagaacttccacttgggtcactcatggctaccacccactccagcccctctcctccagccatcagggcccaataaatgctgcagtcagtgaaggtgaatcttgatgctttgcagaagaagctaagagaatagccaggctattttgccaaagacaaaaatatagatccagtaaacctttgtggtttttaggagacgagcgatactgagcgggctggcaaggc

SEQ ID NO: 2251 - DNA, 495 bp, Artificial Sequence
  source: /note="Description of Artificial Sequence: Synthetic polynucleotide"
gcctccctcgcgccatcagtaggagacgcatctgacagaaatgcagcaaaacccttcagagttaaagcaggagagaggttgtgaggactcacctgaggagacggtgaccagggttccctggccccagtagtcaaagtcgactaggagacgcatctgatcaagtaatacacggacttttcctgagctctcaggttaatcatcttaaaagagaatctcctgaactgagtgtatttgaggattgttaatcatctttttactcaaggagagtcccactgagaacttctatttgaattattgttattacccacacccacccctgtcatgaagcctgctggatcaagcttatgctgttttcagtgaaagtgaatccagaggctttgcagaaaaggcagaattcctggtctgtagtatttctctgtctaactccattagttaacttcacaggggacttctgaaaacataggagacgcatctgactgagcgggctggcaaggc

SEQ ID NO: 2252 - DNA, 495 bp, Artificial Sequence
  source: /note="Description of Artificial Sequence: Synthetic polynucleotide"
gcctccctcgcgccatcagtaggagactgctacaccagaaatgcagcaaaacccttcagagttaaagcaggagagaggttgtgaggactcacctgaggagacggtgaccagggttccctggccccagtagtcaaagtcgactaggagactgctacactcaagtattacaaggccttgtccttgactttcagtttggtccctttaaggtagactgcacatgaaaaggtgtcgcttgggactgttaatttatttgtactcatggagagtaactctgagaactcccacttgatcactcactgtttccacccacaccaatccctgtcatgaagcctgctggaccaagctcatgctgtagccagtaaaggtgaaatcagaggctttgcatgagagtctcagtgaaccactgggctgtacaattttcccccctgactctatcagtaaatttcacacaggacttctgtaggagactgctacacctgagcgggctggcaaggc

SEQ ID NO: 2253 - DNA, 495 bp, Artificial Sequence
  source: /note="Description of Artificial Sequence: Synthetic polynucleotide"
gcctccctcgcgccatcagtaggagacaactgccacagaaatgcagcaaaacccttcagagttaaagcaggagagaggttgtgaggactcacctgaggagacggtgaccagggttccctggccccagtagtcaaagtcgactaggagacaactgccatcactgtaatatacggccttgcccttggctttcaggttggtccttgtaaggtagactgcacttgaaagggtgtcacttgggaatgttgatttatctgtactcatggagagtaacccttagaactcccatatgatctctcactgttgctacccacaccaattcctgttgtgaagcgtgctggaccaagctcatgctgcacccagtaaacccgaaaccagaggctttgcaggacagtctcagtgaactgctgggctgttaaatttttctccttctgactccatcagtaaacatcacacaggactttaggagacaactgccactgagcgggctggcaaggc

SEQ ID NO: 2254 - DNA, 495 bp, Artificial Sequence
  source: /note="Description of Artificial Sequence: Synthetic polynucleotide"
gcctccctcgcgccatcagtaggagacttggactgcagaaatgcagcaaaacccttcagagttaaagcaggagagaggttgtgaggactcacctgaggagacggtgaccagggttccctggccccagtagtcaaagtcgactaggagacttggactgtcaagtaatacacagacttgtcttgggctctcagttttattatcttaaaagagaatcttctgaacagtgtctctgaggactgttaatcttctttgtactgaaggcgagtcccattgagaacttccacttgaattactgttatctccctcaccaacacttgccatgaatcctgctggaccaaacttgttcttttttcagtgaatccaggggctttgcagaacagtctgagaattcttggtctgtagtattttcctgtctgactccactagttaacttcacagaggacttctgcacacacagaggtaggagacttggactgctgagcgggctggcaaggc

SEQ ID NO: 2255 - DNA, 495 bp, Artificial Sequence
  source: /note="Description of Artificial Sequence: Synthetic polynucleotide"
gcctccctcgcgccatcagtaggagactcggtactcagaaatgcagcaaaacccttcagagttaaagcaggagagaggttgtgaggactcacctgaggagacggtgaccagggttccctggccccagtagtcaaagtcgactaggagactcggtacttcacagtaataaacggaattttcctgagctctcaggttaatcatcttaagagagaatcatctgaaaagcgtgtctctgaggactgttaatcttctttgtactcaaggagagtcccactgagaacttccacttgaattactgatgttatcacctacacccacccctgtcatgaagcctgctggaccaagcttatgctgttttcagtgaaagtgaatccacagggtttccagaaaagtctgagaattcttggtctgtagtatttctctgagagactccagtaattaacttcacaggggacctctgtaggagactcggtactctgagcgggctggcaaggc

SEQ ID NO: 2256 - DNA, 495 bp, Artificial Sequence
  source: /note="Description of Artificial Sequence: Synthetic polynucleotide"
gcctccctcgcgccatcagtaggagacccatggatcagaaatgcagcaaaacccttcagagttaaagcaggagagaggttgtgaggactcacctgaggagacggtgaccagggttccctggccccagtagtcaaagtcgactaggagacccatggattcacacagttaaatgctgccatgttctgggttctcaggctgttcatttgcatgtacagcatgtacttggtgttgtctctggaagtggtgagtctgcccctaacatagtctgcattgtattgatgactttcactacgccatataactgcaacccattccagccccttccctgaggcctggcaaacccagtgaatctcatagatactgaaggtgaaccaagaggctgcacaggagagcctcaggggcccctctcagtgtaccaagtctcccccagactctgtaagctgggcctcaccctggatactaggagacccatggatctgagcgggctggcaaggc

SEQ ID NO: 2257 - DNA, 495 bp, Artificial Sequence
  source: /note="Description of Artificial Sequence: Synthetic polynucleotide"
gcctccctcgcgccatcagtaggagacacgaagatcagaaatgcagcaaaacccttcagagttaaagcaggagagaggttgtgaggactcacctgaggagacggtgaccagggttccctggccccagtagtcaaagtcgactaggagacacgaagattcacagtaatacactgcctacccctgtgagagccccctcagcttccaagtagattattttaagggagactgtgctggtaattggtgtccctgggaattgtgaatcttcattatgctgatgcagaatatcactgagaacttccacttgaatcaatcactgttaccacccactccagcctctgtcccccagccatctgggctcaatttatgctgtagtcagtgaaggtgaatcttgatgctttgcaaaagaggctaagagaacagccaggctgttttgccaaagataaaaatatagatccagtaataggagacacgaagatctgagcgggctggcaaggc

SEQ ID NO: 2258 - DNA, 495 bp, Artificial Sequence
  source: /note="Description of Artificial Sequence: Synthetic polynucleotide"
gcctccctcgcgccatcagtaggagacactgtggacagaaatgcagcaaaacccttcagagttaaagcaggagagaggttgtgaggactcacctgaggagacggtgaccagggttccctggccccagtagtcaaagtcgactaggagacactgtggatcaacagtattacacaaccttgtccttggctttcaggttagtcattgtaaggtagagtgcacgtgaaagggtgtcgctggaccagttaatttatttgtactcatgaagagtaaacctgagcactcccacttgttgactcactgttgccagccaccacaatccctgttgtgaagcctgctggaccaacctcaggctgttgccagaaaaggtgaatccagacgctttgcaagaaagtctcagtgaaccactgggctgtactacgtttacccctctgactccaccactgaacttcatacaggactttaggagacactgtggactgagcgggctggcaaggc

SEQ ID NO: 2259 - DNA, 495 bp, Artificial Sequence
  source: /note="Description of Artificial Sequence: Synthetic polynucleotide"
gcctccctcgcgccatcagtaggagacggtgtcatcagaaatgcagcaaaacccttcagagttaaagcaggagagaggttgtgaggactcacctgaggagacggtgaccagggttccctggccccagtagtcaaagtcgactaggagacggtgtcattcaagtaatacatggccttctcctcggctctcaggttggtcattttgagggagactgtgctgacaagggtgtccctgaggattatgatttttctttgtattgatggagggtaccactaacaaattccacttgaatccctcgcttttgcctcccacaccaacccctgtcctgaagcctgctgggctgagctcatgctagagtcaatgaaggtaaattcagaggctttgtaaaaaaggctctgagaacagttaggctgtatcatttctcttccagattccaccagtgaacttcttgtaggactcttaggagacggtgtcatctgagcgggctggcaaggc

SEQ ID NO: 2260 - DNA, 495 bp, Artificial Sequence
  source: /note="Description of Artificial Sequence: Synthetic polynucleotide"
gcctccctcgcgccatcagtaggagactcgtgaagcagaaatgcagcaaaacccttcagagttaaagcaggagagaggttgtgaggactcacctgaggagacggtgaccagggttccctggccccagtagtcaaagtcgactaggagactcgtgaagtcacagtaatacaaggtcttgtccttggctttcacattggtcattttaaggtagactgcacttgaaagggtgttgcttgggactgttaatttacttgtactcatggagagtaaccctgataactcactgttgccacccacacaaatccctgtcatgaagcctgctggaccaagctcatgctgtagccagtacaagtgaaatcagaggctttgcaggagagtctgtgagaaccgctgggctgtacaatgtttccccctctgactccatcagtaagcttcaacaggacttacatgaacacagaggtaggagactcgtgaagctgagcgggctggcaaggc

SEQ ID NO: 2261 - DNA, 495 bp, Artificial Sequence
  source: /note="Description of Artificial Sequence: Synthetic polynucleotide"
gcctccctcgcgccatcagtaggagaccactagctcagaaatgcagcaaaacccttcagagttaaagcaggagagaggttgtgaggactcacctgaggagacggtgaccagggttccctggccccagtagtcaaagtcgactaggagaccactagcttcacacagtaatacacgcctgcatccccagccatcacacttctcagctgtaagttttcttgttttttactatgtgtttctggagatgctagctctgccctgaaggttggggcttagtgtttcccttaacccatatcacaccaacacactgaagaccttttgatgggagatggtggatccaggaaacagaatgttcagaaattgaatgtgcataggcggcataggtgaggctgagcatgaccaaggggaccactacttcttcctcccattgcacaaggtggtcctcactgtgaacccctgagaataggagaccactagctctgagcgggctggcaaggc

SEQ ID NO: 2262 - DNA, 495 bp, Artificial Sequence
  source: /note="Description of Artificial Sequence: Synthetic polynucleotide"
gcctccctcgcgccatcagtaggagacggtcaactcagaaatgcagcaaaacccttcagagttaaagcaggagagaggttgtgaggactcacctgaggagacggtgaccagggttccctggccccagtagtcaaagtcgactaggagacggtcaacttcagcacagtagtacacatctatgtcctcagatctctgactgctcagctccatgtaggctgtgctcgtggacgtgtccctggtcatggtgactctgccctgaaacttctgtgcatagcctgtgttaccattgccagagtagctccctaccatccattcaaacccttatccaggggcctgtcacacacagtgaatgtcgtagctggcgaaggtgtatccagagctttgcaggagaccttcactgaggccatggacgctggcaacaggagagtcatcagaagctgggtgagtcatataatcaggataggagacggtcaactctgagcgggctggcaaggc

SEQ ID NO: 2263 - DNA, 495 bp, Artificial Sequence
  source: /note="Description of Artificial Sequence: Synthetic polynucleotide"
gcctccctcgcgccatcagtaggagactacgtacgcagaaatgcagcaaaacccttcagagttaaagcaggagagaggttgtgaggactcacctgaggagacggtgaccagggttccctggccccagtagtcaaagtcgactaggagactacgtacgtcaacaggaatacacgaccatgtcttcagatctcaggctgctcagctccatgtaggctgtgctcacggacctgtcactggtaatggtgactctgccccggaacttctgtgcgtagtgtgtgttatcattgtaagggttgatgcatcccaaccactatgcccttgtccagggccctgtcgcacccactgtgtaaagtatttggtgaaggtgtatctggaagcctggccaggagaccttcactgaggacgcaggcttcttcacctcagccccaggctgcaacagctgaacctgggaatggacatctaggagactacgtacgctgagcgggctggcaaggc

SEQ ID NO: 2264 - DNA, 495 bp, Artificial Sequence
  source: /note="Description of Artificial Sequence: Synthetic polynucleotide"
gcctccctcgcgccatcagtaggagacatgacacccagaaatgcagcaaaacccttcagagttaaagcaggagagaggttgtgaggactcacctgaggagacggtgaccagggttccctggccccagtagtcaaagtcgactaggagacatgacacctcacacagtaatacatggccgtgtcttcagatctcaggctgctcagctccatgtaggctgtgctcgtggatgtgtccctggtcatggtgactctgccctggaacttctctgcgtagcttatgctgccatcactagggcacatccttcccatccactcaagcccttgtgcatgggcctggcgcacctagtgcatagagtaactggtgaaggtaggtgtatccacaagtcttgcaggagactttcactgatgccccagccttcttcatctcatccccagactgcaccagctgcacctgggactggtaggagacatgacaccctgagcgggctggcaaggc

SEQ ID NO: 2265 - DNA, 495 bp, Artificial Sequence
  source: /note="Description of Artificial Sequence: Synthetic polynucleotide"
gcctccctcgcgccatcagtaggagaccttcacgacagaaatgcagcaaaacccttcagagttaaagcaggagagaggttgtgaggactcacctgaggagacggtgaccagggttccctggccccagtagtcaaagtcgactaggagaccttcacgatcacccagtaatacacagccgagtcctcagatctcaggctgctcagctctatgtaggctgtcctcagggacatgtccctggtaatggtgactctgccctggaacttctttgcatagttggtgttaccattgtaaagtgtgatccatctcatcctttcaagcccttgtccaggggcctgttgcaaccagtgcaaggagcagcaagtgaaggtgtatccggaagccttgcaggagaccttcactgaggccccaggcttctttacctcagcctcagactgccccagctgcacctgggagcagacactaggagaccttcacgactgagcgggctggcaaggc

SEQ ID NO: 2266 - DNA, 495 bp, Artificial Sequence
  source: /note="Description of Artificial Sequence: Synthetic polynucleotide"
gcctccctcgcgccatcagtaggagacagaatcagcagaaatgcagcaaaacccttcagagttaaagcaggagagaggttgtgaggactcacctgaggagacggtgaccagggttccctggccccagtagtcaaagtcgactaggagacagaatcagtcacacagtaatacacgaccatgtcttcagatctcaggctgctcagctccatgtaggctgtgctcatggacctgtcactggtaatggtgactctgccccagaacgtctgtgcatagtgtgtgttatcattgtaagggttgattcatcccatccactatgcccttgtccagggctttgtcacacccaccgtgtaaagtatttggtgaaggtgtatctggaagcctggcaggagaccttcactgaggacccaggcttcttcacctcagccccaggctgcaacagctgaacctgggaatggacacctaggagacagaatcagctgagcgggctggcaaggc

SEQ ID NO: 2267 - DNA, 495 bp, Artificial Sequence
  source: /note="Description of Artificial Sequence: Synthetic polynucleotide"
gcctccctcgcgccatcagtaggagacagttatgccagaaatgcagcaaaacccttcagagttaaagcaggagagaggttgtgaggactcacctgaggagacggtgaccagggttccctggccccagtagtcaaagtcgactaggagacagttatgctcatgcacagtaatgtgtggctgtgtccacaatgtccatgttgatcactgttagaaccacttcattcttggaggtgtccttggagataatgagcctactcttcagagatgggctgtagtatttattatcattctaataaatgtgtgcaagccactccagggcctttgctgagggctgacagatctaacccacacccattccagaagtgctgagtgagaacccagagaaggtgcaggtcagcatgagggtctgtgtgggtttcaccagtgcaggaccagactccttcaaggtgacctgggataataggagacagttatgcctgagcgggctggcaaggc

SEQ ID NO: 2268 - DNA, 495 bp, Artificial Sequence
  source: /note="Description of Artificial Sequence: Synthetic polynucleotide"
gcctccctcgcgccatcagtaggagacaggtctcacagaaatgcagcaaaacccttcagagttaaagcaggagagaggttgtgaggactcacctgaggagacggtgaccagggttccctggccccagtagtcaaagtcgactaggagacaggtctcatcacagagtcatatgcagctgcatcctctgccctcagtctgttcatttgcagatacagtgagtttttggtattgtctctggaaatggtgaatcggcccttcacagagtctgcgtagtacatggtactaccactaccactaataactgggacccactgcagacccttccctggagcctgggggacccagtgcgtgctatggctactgaaggtgaatccagaggctgcacaggagagtctcagggacacccaggctttgtcaagtttgctccagactctaccagctgcatctcacactggacacctaggagacaggtctcactgagcgggctggcaaggc

SEQ ID NO: 2269 - DNA, 495 bp, Artificial Sequence
  source: /note="Description of Artificial Sequence: Synthetic polynucleotide"
gcctccctcgcgccatcagtaggagacgtcatagtcagaaatgcagcaaaacccttcagagttaaagcaggagagaggttgtgaggactcacctgaggagacggtgaccagggttccctggccccagtagtcaaagtcgactaggagacgtcatagttcacacagtaatacacagccatgtcctcgggcctcaggctgttcatttgctgatacaggaagttcctggaattgtctctggagatgatgaatcggcccttcacagagtctgcatagtgcgtcctactgccattccaactaacacccgatacccactccagcccctttcctggagcctggcggacccagttcatgtcactgttactgaaggtgaatccagaggctgcacaggagagtctcagggaccccccaggctctaccaagcctcccccagactccaccagctgcactgttgtacccaggttaggagacgtcatagtctgagcgggctggcaaggc

SEQ ID NO: 2270 - DNA, 495 bp, Artificial Sequence
  source: /note="Description of Artificial Sequence: Synthetic polynucleotide"
gcctccctcgcgccatcagtaggagacgtgacttgcagaaatgcagcaaaacccttcagagttaaagcaggagagaggttgtgaggactcacctgaggagacggtgaccagggttccctggccccagtagtcaaagtcgactaggagacgtgacttgtcaacagtaatacacggccgtgtcctcggttttcaggctcttcatttgcagataggtgatgcttttggaatcatctcttgagattgtgaatctgcctttcacagacgtggtctattctgttgtcccaccattagctttgtttctaatgaaacctacccattccagccccttcccgggagcctggcggaccccgctcatgtagtagtaactgaaggtgaatccagaggctgcacaggagagtctcagggaccccccaggctgtaccaagcctcccccagactccaccagctgcacctcacactgtaggagacgtgacttgctgagcgggctggcaaggc

SEQ ID NO: 2271 - DNA, 495 bp, Artificial Sequence
  source: /note="Description of Artificial Sequence: Synthetic polynucleotide"
gcctccctcgcgccatcagtaggagacgattgcagcagaaatgcagcaaaacccttcagagttaaagcaggagagaggttgtgaggactcacctgaggagacggtgaccagggttccctggccccagtagtcaaagtcgactaggagacgattgcagtcaacactaatagagggccgtgtcctcggttttcaggctgttcatttgcagatgaagtgtgttcttggcgttatctctggaggtattgaatcggtccttaccggagtctatgaggtatgtgctacccccattaggattaacttgtcaaaccaactccagcccattccctggagcctggcggacacagttcatgtagtagctactgaaggtgaattgagaggctgcacaggagagtctcggggaccacgcaggctttgccaagcctcccccagactccaccagctgcatctcacactggatacctaggagacgattgcagctgagcgggctggcaaggc

SEQ ID NO: 2272 - DNA, 495 bp, Artificial Sequence
  source: /note="Description of Artificial Sequence: Synthetic polynucleotide"
gcctccctcgcgccatcagtaggagacactatgaccagaaatgcagcaaaacccttcagagttaaagcaggagagaggttgtgaggactcacctgaggagacggtgaccagggttccctggccccagtagtcaaagtcgactaggagacactatgactcatgtacagccatacacagccatgtcctcagttctctgactgttcatttgcagatacagagagttcttagcattgtctttggagatggagaatctgcccttcacagagtctgcatggtgtatctgacttccatcatcttttatatctattactcactccagccccttgcctgcagactggtgaactgggctcattcagaagctactgaaggcgaatctagaggctacacaggagagtctcaggaacttcccaggttgtctcaggtcctctgtgggctctatcagctccacctcacactgaactaggagacactatgacctgagcgggctggcaaggc

SEQ ID NO: 2273 - DNA, 495 bp, Artificial Sequence
  source: /note="Description of Artificial Sequence: Synthetic polynucleotide"
gcctccctcgcgccatcagtaggagacatggtcaacagaaatgcagcaaaacccttcagagttaaagcaggagagaggttgtgaggactcacctgaggagacggtgaccagggttccctggccccagtagtcaaagtcgactaggagacatggtcaatcacatacagtaacacacagctgtgcccgctgctctcagactgttcattagcaaatacagtgagttcttggcattttctttggagatggtgaatttgctcttcaaagattatgcataacatatctgacttccatcacactgtatatctactactcactccagccccttccctggagcctgggaaaccgagttccttcagtagctactgaaggttaatccagagtctgcacaggagagtctcagggatcccccaggttgtcttgggtcctctccggactccacgagctgtacctctcactagactaggagacatggtcaactgagcgggctggcaaggc

SEQ ID NO: 2274 - DNA, 495 bp, Artificial Sequence
  source: /note="Description of Artificial Sequence: Synthetic polynucleotide"
gcctccctcgcgccatcagtaggagacgatggcttcagaaatgcagcaaaacccttcagagttaaagcaggagagaggttgtgaggactcacctgaggagacggtgaccagggttccctggccccagtagtcaaagtcgactaggagacgatggctttcatgtatagccatacacggccacgtcctcagctctctgagtgttcatttgcagatacagagagttcttagcattgtctttggagatggagaatctgcccttcacagagtctgcatggtgtatctgacttccatcatcttttatatctattactcactccagccccttgcctggagactggtgaactcggctcattcagaagctactgaaggcgaatctagaggctacacaggagagtctcaggaacttcccaggttgtctcaggtcctctatggactctatcagctccacctcacactgaactaggagacgatggcttctgagcgggctggcaaggc

SEQ ID NO: 2275 - DNA, 495 bp, Artificial Sequence
  source: /note="Description of Artificial Sequence: Synthetic polynucleotide"
gcctccctcgcgccatcagtaggagacagcatatgcagaaatgcagcaaaacccttcagagttaaagcaggagagaggttgtgaggactcacctgaggagacggtgaccagggttccctggccccagtagtcaaagtcgactaggagacagcatatgtcacatacagtaacacacagctgtgccctctgctctcagactgttcatttgcaaatacagtgagttcttggcattttctttggagatggtgaatttgctcttcacagattgggcataacatatctgacttccatcacactgtatatctactactcactccagccccttccctggagcctgggaaaccgagctcattcagtagctactgaaggttaatccagagtctgcacaggagagtctcaaggatcccccaggttgtcttgggtcctctccggactccacgagctgtacctctcactagactaggagacagcatatgctgagcgggctggcaaggc

SEQ ID NO: 2276 - DNA, 495 bp, Artificial Sequence
  source: /note="Description of Artificial Sequence: Synthetic polynucleotide"
gcctccctcgcgccatcagtaggagaccatatgctcagaaatgcagcaaaacccttcagagttaaagcaggagagaggttgtgaggactcacctgaggagacggtgaccagggttccctggccccagtagtcaaagtcgactaggagaccatatgcttcaagtaatacacagacctatcctcggctctgacgctgttcatttgcagatacagtgatttcttggcatcatctctggagagggtgaatcgacccttcacagagtctgcatagcttgtgctacctacacaacaactcataaatgagacctactccagccctttcccaggagcctgatggacccagctcatccagtacctaataaaggtactaaaggtgaatccagaggctgcaaaagaaagtctcagggacccccaggctataacaagcctcccaaagactccaccagctgcacctcacactgtaggagaccatatgctctgagcgggctggcaaggc

SEQ ID NO: 2277 - DNA, 495 bp, Artificial Sequence
  source: /note="Description of Artificial Sequence: Synthetic polynucleotide"
gcctccctcgcgccatcagtaggagactcgtcgatcagaaatgcagcaaaacccttcagagttaaagcaggagagaggttgtgaggactcacctgaggagacggtgaccagggttccctggccccagtagtcaaagtcgactaggagactcgtcgattcaacacagccgagtcctcatctctcagactgttcatttgcaagtacagcatgttcttgccattgtctctagagatggtgaatctacccttcagtgtctgcatagtataggctaccaccactagcactaatgtatgagacccattccagcccctttcttgaagcccggtgggcccagttcatgtcattgcttctcaagatgaatccgcaggctgcacatgagagtctcaggacacccccaaccccaccacagctgtaccaagtctcccccagactctaccagctgcacctcatactgcacacctaggagactcgtcgatctgagcgggctggcaaggc

SEQ ID NO: 2278 - DNA, 495 bp, Artificial Sequence
  source: /note="Description of Artificial Sequence: Synthetic polynucleotide"
gcctccctcgcgccatcagtaggagaccagtctgtcagaaatgcagcaaaacccttcagagttaaagcaggagagaggttgtgaggactcacctgaggagacggtgaccagggttccctggccccagtagtcaaagtcgactaggagaccagtctgttcaagtaatacatggccgtgtccttagctttcagactgtccatttgcagatagagcatgctcttagaattgtctcggagattgtgaatcggcccttcacagagtctgcatagtatttctgacttccatcattccagatatgtgccactcactccagccccttccctggagcctggcggacccagctcatgccatagctactaaaggagaatcctgaggctgcacaggagagtctcagggaccccccaggctggaccaagcctcccccagactccaccagctgcacctcacactggacacctgctaggagaccagtctgtctgagcgggctggcaaggc

SEQ ID NO: 2279 - DNA, 495 bp, Artificial Sequence
  source: /note="Description of Artificial Sequence: Synthetic polynucleotide"
gcctccctcgcgccatcagtaggagacaacgcgtacagaaatgcagcaaaacccttcagagttaaagcaggagagaggttgtgaggactcacctgaggagacggtgaccagggttccctggccccagtagtcaaagtcgactaggagacaacgcgtatcagtacagtaatagatggccgtgtactcggttttcagggtattcacttgcagatacagtgtgttctttgaatcatctcttgagatggtgaacctgcctttcacagatgcagcgcattctgtcgtgtaactgttacgtttggttctaatacggccaacccactccagccctttcccagaagcctggcggatccagtgcattcagaagtcactgaaggtgaatctagaagctgcaaatgagagtctcggggacccacccaggctgtaccaagcctcccccagactccaccagctgcgcctcacgtaggagacaacgcgtactgagcgggctggcaaggc

SEQ ID NO: 2280 - DNA, 495 bp, Artificial Sequence
  source: /note="Description of Artificial Sequence: Synthetic polynucleotide"
gcctccctcgcgccatcagtaggagacgtagttcgcagaaatgcagcaaaacccttcagagttaaagcaggagagaggttgtgaggactcacctgaggagacggtgaccagggttccctggccccagtagtcaaagtcgactaggagacgtagttcgtcaacaataatacacagccatgtcctcagctatcaggctgttcatttgaagatacaaggacttcttggcgttgtctctggagatggtgaatcggcccatcacggagtctgcatagtatgtatcaccaccagtaccaatagctgatacccactccggacccttccctggagcccggcgaacccagtgcagaacatagctactgaaggcgaatccagaggctgcacaggagggtctcagggaccccccaggctgtaccaagcctcccccagactccaccagctgatcctcacactggacacctgctaggagacgtagttcgctgagcgggctggcaaggc

SEQ ID NO: 2281 - DNA, 495 bp, Artificial Sequence
  source: /note="Description of Artificial Sequence: Synthetic polynucleotide"
gcctccctcgcgccatcagtaggagaccgaactaccagaaatgcagcaaaacccttcagagttaaagcaggagagaggttgtgaggactcacctgaggagacggtgaccagggttccctggccccagtagtcaaagtcgactaggagaccgaactactcatgactcaataatacagagccatattctcagctctcagactgttcatttgcagatacaacctgtgcttggcattgtctttggagatggtgaatctgaccttcacagagtctgcatattatgtctgacttccatcgtacattatatctactactcactgcagcccctttcctggagcctggcagattcagctgatctagtagctacagaaggtggattcagaggatgcacggcagagtctcaggcacattcagcttgtgccaactctccccaagactccaccatctgcaccccacactagactaggagaccgaactacctgagcgggctggcaaggc

SEQ ID NO: 2282 - DNA, 495 bp, Artificial Sequence
  source: /note="Description of Artificial Sequence: Synthetic polynucleotide"
gcctccctcgcgccatcagtaggagacttaacgtccagaaatgcagcaaaacccttcagagttaaagcaggagagaggttgtgaggactcacctgaggagacggtgaccagggttccctggccccagtagtcaaagtcgactaggagacttaacgtctcaacagtaatacacggtcatgtcctcagctctcaggctgttcacttgcagatagagggagttcttggcattgtctctggagatggtcaatcggcccttcacagagtctacatagtatttctcacttccgtcacactttatgtcggccacccactccagccccttctccggagcctggcagacccagtgcatccaggagctactgaaggtgaatccagaggctgcacaggagagtctcagggaccctccaggctgtaccaagcctcacccagactccaccagctgcacctcacactggacacctaggagacttaacgtcctgagcgggctggcaaggc

SEQ ID NO: 2283 - DNA, 495 bp, Artificial Sequence
  source: /note="Description of Artificial Sequence: Synthetic polynucleotide"
gcctccctcgcgccatcagtaggagacagcaacctcagaaatgcagcaaaacccttcagagttaaagcaggagagaggttgtgaggactcacctgaggagacggtgaccagggttccctggccccagtagtcaaagtcgactaggagacagcaaccttcacatacagtaatacacggccgtgccctctgctctcagactgttcatttgcaaacagagtgagttcttggcattttctttggagatggtgaatctgctcttcacagattgtgcataacatagctgacttctatcctactatatatctactactcactccagccccttccctggagcctgggaatctgagctcattcagtagctactgaaggttaatccagagtctgcacaggagagtctcagggatcccccaagttgtctttggttttcttcagactccaccagctgtacctcacactggactaggagacagcaacctctgagcgggctggcaaggc

SEQ ID NO: 2284 - DNA, 495 bp, Artificial Sequence
  source: /note="Description of Artificial Sequence: Synthetic polynucleotide"
gcctccctcgcgccatcagtaggagacttctcgagcagaaatgcagcaaaacccttcagagttaaagcaggagagaggttgtgaggactcacctgaggagacggtgaccagggttccctggccccagtagtcaaagtcgactaggagacttctcgagtcaacagtaatacacagccttgtccttggctttcaggttggtcattgtaaggtagactgcacatgaaaaggtgtcgcttgggactgttaatttatttgtactcatggagagtaactctgagaactcccacttgatcactcactgtttccacccacaccaatccctgtcatgaagcctgctggaccaagctcatgctgtagccagtaaaggtgaaatcagaggctttgcaggagagtctcagtgaaccactgggctgtacaattttctgcctctgactccatcaataaacttcacacaggactttaggagacttctcgagctgagcgggctggcaaggc

SEQ ID NO: 2285 - DNA, 495 bp, Artificial Sequence
  source: /note="Description of Artificial Sequence: Synthetic polynucleotide"
gcctccctcgcgccatcagtaggagacactctacgcagaaatgcagcaaaacccttcagagttaaagcaggagagaggttgtgaggactcacctgaggagacggtgaccagggttccctggccccagtagtcaaagtcgactaggagacactctacgtcaacacagtaatacacagccatgtcgtcggctctcaggctgttcatttgcagatacagtgaattctgggcattgtctctagagatggtgaatcagcccttcacagagtctgtgtagagtacggtatcaccacttgtactaataactgagacccactccaaaccctttcctggagcctggtggacccagtgcatagcagagctactgaaggtgaatccagaggctgcacaggagagtctcagagaccctcccagtctttactaagcctcccccagactccaccagctgcacctcacactggactaggagacactctacgctgagcgggctggcaaggc

SEQ ID NO: 2286 - DNA, 495 bp, Artificial Sequence
  source: /note="Description of Artificial Sequence: Synthetic polynucleotide"
gcctccctcgcgccatcagtaggagactaccggaacagaaatgcagcaaaacccttcagagttaaagcaggagagaggttgtgaggactcacctgaggagacggtgaccagggttccctggccccagtagtcaaagtcgactaggagactaccggaatcaacagtagtacacaactgtgccctcggctctcaggctgttcatttgcagagacagtgaattctgggcattgtctctggagatggtgaatcggcccttcacagagtctgtgtagagtacggtatcaccacttgtactaataactgagacccactacaaaccctttcttggagcctggcggacccagtgcatagcagagctactgaaggtgaatccagaggctgcacaggagagtctcagggaccccccaggctggaccaagccttccccagactccaccagctgcacctcacactggacacctaggagactaccggaactgagcgggctggcaaggc

SEQ ID NO: 2287 - DNA, 495 bp, Artificial Sequence
  source: /note="Description of Artificial Sequence: Synthetic polynucleotide"
gcctccctcgcgccatcagtaggagaccgaattgccagaaatgcagcaaaacccttcagagttaaagcaggagagaggttgtgaggactcacctgaggagacggtgaccagggttccctggccccagtagtcaaagtcgactaggagaccgaattgctcatgtacagccatgcatggtcatgtcctcagctctcagactgttcgtttggagatacggtgagttcttagcattgtctttggagatggtgaatctgcccttcacagagtctgcatggtatatctgacttccatcatattttacatctattactccctccagccccttccctagagtctcattgacccagctcattcagtagctactgaaggtgaatccagaggctacacaggagagtctcaggaacttcccaagttgtctcaggccctctatggactctatcagctccacctcacactgaactaggagaccgaattgcctgagcgggctggcaaggc

SEQ ID NO: 2288 - DNA, 495 bp, Artificial Sequence
  source: /note="Description of Artificial Sequence: Synthetic polynucleotide"
gcctccctcgcgccatcagtaggagacttcgctcacagaaatgcagcaaaacccttcagagttaaagcaggagagaggttgtgaggactcacctgaggagacggtgaccagggttccctggccccagtagtcaaagtcgactaggagacttcgctcatcagtatagtaatacacggccgtgtcctcggttttcaggctgttcatttgcagataggcgatgcttttggaatcatcgcttgagatggtgaatctgcctttcacagacgcggcgtattctgttgttccacgattagttttgtttttagtgaaacctacccactccagcccctttcctggagcccggcagatccactgcatgcagtagttaacggaaggtgaatccagaggctgcacaggagagtctcagggaccccccaggctgtaccaagcctcccccagactccaccagctgcacctcacataggagacttcgctcactgagcgggctggcaaggc

SEQ ID NO: 2289 - DNA, 495 bp, Artificial Sequence
  source: /note="Description of Artificial Sequence: Synthetic polynucleotide"
gcctccctcgcgccatcagtaggagacgacgttaacagaaatgcagcaaaacccttcagagttaaagcaggagagaggttgtgaggactcacctgaggagacggtgaccagggttccctggccccagtagtcaaagtcgactaggagacgacgttaatcaacagtaatacacggccgtgtcctcggctctcaggctgttcatttgcagataggtgatgcttttggaatcatctcttgagattgtgaatctgcctttcacagacgtggtctattctgttgtcccaccattagctttgtttctaatgaaacctacccactccagccccttcccgggagcctggcggacccagctcatgtagtagtcactgaaggtgaatccagaggctgcacaggagagtctcagggaccccccaggctggaccaagcctcccccggactccaccagctgcacctcacactgtaggagacgacgttaactgagcgggctggcaaggc

SEQ ID NO: 2290 - DNA, 495 bp, Artificial Sequence
  source: /note="Description of Artificial Sequence: Synthetic polynucleotide"
gcctccctcgcgccatcagtaggagaccgtagagtcagaaatgcagcaaaacccttcagagttaaagcaggagagaggttgtgaggactcacctgaggagacggtgaccagggttccctggccccagtagtcaaagtcgactaggagaccgtagagttcacacagtaatacgtggctgtgtactcagctctcaaactgttcatttccagataagagtgtgttcttggcattgtttctggagatggggaatcagaacttcccagaatgtgcatagcgtatgctactcccatcagtactaatacatgagacccactccagtctgttccctggagcctggcaggcccagtgcatccagtggctactgaaggcaaatccagaggctgcacaggacagtctcagggacccccacccccaccgcgccaggctgtaccaagtctcccccaggctccaacaactgcgctaggagaccgtagagtctgagcgggctggcaaggc

SEQ ID NO: 2291 - DNA, 495 bp, Artificial Sequence
  source: /note="Description of Artificial Sequence: Synthetic polynucleotide"
gcctccctcgcgccatcagtaggagacttccggtacagaaatgcagcaaaacccttcagagttaaagcaggagagaggttgtgaggactcacctgaggagacggtgaccagggttccctggccccagtagtcaaagtcgactaggagacttccggtatcacagtaatagacggccatggtgtcagcaatgaaactgtttatttgcagatacagtgagttcttggtgttttctctggagatggtcaaccggcccttcacagagtctgagtagtatatgcctccaccactagcattaatgtaagacccactccagtcccttccctggagcttggtccacctagtgcatgccatagttactgaaagtgtatccagaggctgcacaggagagtcacatggaccccccaagctgtaccaagcctcccccagactctaccagctacacttcacattggacacctgctaggagacttccggtactgagcgggctggcaaggc

SEQ ID NO: 2292 - DNA, 495 bp, Artificial Sequence
  source: /note="Description of Artificial Sequence: Synthetic polynucleotide"
gcctccctcgcgccatcagtaggagacgcaattcgcagaaatgcagcaaaacccttcagagttaaagcaggagagaggttgtgaggactcacctgaggagacggtgaccagggttccctggccccagtagtcaaagtcgactaggagacgcaattcgtcacatacagtaacacacagctgtgccctctgctctcagactgttcatttgcaaatacagtgagttcttggcattttctttggagacggtgaatctgctcgtcacagattgtgcataacatatctgacttccatcacactgtatatctactactcactccagccccttccctggagcctgggaaaccgagctcattcagtagctactgaaggttaatccagaggctgcacaggagagtctcagggaacccaggttgtcttgggtcctctccagactccaccagctgtacctcacactggacactaggagacgcaattcgctgagcgggctggcaaggc

SEQ ID NO: 2293 - DNA, 495 bp, Artificial Sequence
  source: /note="Description of Artificial Sequence: Synthetic polynucleotide"
gcctccctcgcgccatcagtaggagactgagcgaacagaaatgcagcaaaacccttcagagttaaagcaggagagaggttgtgaggactcacctgaggagacggtgaccagggttccctggccccagtagtcaaagtcgactaggagactgagcgaatcaacagtaatacacagccgtgtcctcggctctcaggctgttcatttgcagatacagtgagttcttggcgttgtctctggagatggtgaatcggcccttcacagagtctgcgtagtatatggtactactactactaatggatgagacccactccagccccttccctggagcctggcggacccagttcatgtagtagtcactgaaggtgaatccagaggctgcacaggagagtctcagggaccccccaggctttaccaagcctcccccagactccaccagctgcacctcacactggacacctgctaggagactgagcgaactgagcgggctggcaaggc

SEQ ID NO: 2294 - DNA, 495 bp, Artificial Sequence
  source: /note="Description of Artificial Sequence: Synthetic polynucleotide"
gcctccctcgcgccatcagtaggagactactaagccagaaatgcagcaaaacccttcagagttaaagcaggagagaggttgtgaggactcacctgaggagacggtgaccagggttccctggccccagtagtcaaagtcgactaggagactactaagctcaacagtaatacacggccgtgtccgcggcggtcacagagctcagcttcaggtagaactggttcttggacgtgtctacggacatggtgattcgactcttgagggacgggttgtagtaggtgctcccactatgatggatttccccaatccactccagccccttccctgggggctggcggacccagattcaccagttaccactgctgatggagtcaccagagacagcgcagatgagggacagggtctccgaaggcttcaccagtcctgggcccgactcctgcagctgcacctgggacaggacccctaggagactactaagcctgagcgggctggcaaggc

SEQ ID NO: 2295 - DNA, 495 bp, Artificial Sequence
  source: /note="Description of Artificial Sequence: Synthetic polynucleotide"
gcctccctcgcgccatcagtaggagactggcgtatcagaaatgcagcaaaacccttcagagttaaagcaggagagaggttgtgaggactcacctgaggagacggtgaccagggttccctggccccagtagtcaaagtcgactaggagactggcgtattcactgcgcccgccccctccgcctccctgcggtcacagagctcagcttcagggaaaactggttcttggacgtttctattgacatggtgactcaactcctgagggacggggtgtagtagctcctcccactataatagatgtatccaatccattccagccccttccctggggactggcggaccagctccaccagttaccactgctgatggagtcaccagagacagcgcatgtgagggacagggtctccgaagcttcaccagtcctgggccccactcctgcagctgcactgggacaggacccctgttaggagactggcgtatctgagcgggctggcaaggc

SEQ ID NO: 2296 - DNA, 495 bp, Artificial Sequence
  source: /note="Description of Artificial Sequence: Synthetic polynucleotide"
gcctccctcgcgccatcagtaggagacgataaccacagaaatgcagcaaaacccttcagagttaaagcaggagagaggttgtgaggactcacctgaggagacggtgaccagggttccctggccccagtagtcaaagtcgactaggagacgataaccatcattagatggtccctctcacacaataatacatggcggcgtccgaggccttcaggctgctccactgcaggtaggcggtgctgctggagctgtcggctgagatggtgacgtggccttggaaggatgggctgtatctggtatcagagttcccaggatagatgctccccatccactccagttctttcccgggcatctggcgcacccagtggatccagtagctggtaaagctgtatccagaagtcttacaggagatcctcagagactccccgggtcttttcacctctgctgcagactgcaacagctgtaggagacgataaccactgagcgggctggcaaggc

SEQ ID NO: 2297 - DNA, 495 bp, Artificial Sequence
  source: /note="Description of Artificial Sequence: Synthetic polynucleotide"
gcctccctcgcgccatcagtaggagacctagtgaacagaaatgcagcaaaacccttcagagttaaagcaggagagaggttgtgaggactcacctgaggagacggtgaccagggttccctggccccagtagtcaaagtcgactaggagacctagtgaatcagcacgtgtcctcagcctttaggctgctgatatgaagatatgccatgctgacggaggtgtccatggagaagacaaaccgtcctgtgaagccctgggcatacgttaggttcccagtgttggtgttgatccatcccatttcctcaagcccttgtccatgggcctgtcatacccagctgatagcatagcttgtgaaggtgtatccagaagccttgcaggaaaccttcaatgaggctccaggcttcttcacctcaggcccagactgcaccagctgcacctgtgagtggacacctgtggagaggagtaggagacctagtgaactgagcgggctggcaaggc

SEQ ID NO: 2298 - DNA, 495 bp, Artificial Sequence
  source: /note="Description of Artificial Sequence: Synthetic polynucleotide"
gcctccctcgcgccatcagtaggagacacgttcaccagaaatgcagcaaaacccttcagagttaaagcaggagagaggttgtgaggactcacctgaggagacggtgaccagggttccctggccccagtagtcaaagtcgactaggagacacgttcactcaacagtaatactcggccgtgtcctcagcctttaggctgctgatctgaagacacgccgtgctgacagacgtgtccatggagaagacaaaccatcctgtgaagccgtgggtatacgttgggttcccagtgtaggtgatgatccatcacatccactcaaagccctgtccaggggtctatcatacccaattcataccatagatggtgaaggtgtaaccagaagacttataggagaccttcactgaggccccaggcttcttcacctcaggcccagactgcaccagctgcagggagtgggcacctgttaggagacacgttcacctgagcgggctggcaaggc

SEQ ID NO: 2299 - DNA, 448 bp, Artificial Sequence
  source: /note="Description of Artificial Sequence: Synthetic polynucleotide"
gcctccctcgcgccatcagtaggagacattacgctcagaaatgcagcaaaacccttcagagttaaagcaggagagaggttgtgaggactcacctgaggagacggtgaccagggttccctggccccagtagtcaaagtcgactaggagacattacgcttcatctctcatacagtcatacacggccgtgtcctcagcctttaggctgctgatcttcagatacgccatgctgacagaggtgtccatggagaatagaaaccgtcctgtgaagccgttggtatatgttgggttcccagtgtaggtgatgatccatcccatccactcaagcccttgtccaggggctggtcacactgaattcataccatactggctgcatagtattccatgatttacatatatcatattttatctaatcataggagacattacgctctgagcgggctggcaaggc

SEQ ID NO: 2300 - DNA, 495 bp, Artificial Sequence
  source: /note="Description of Artificial Sequence: Synthetic polynucleotide"
gcctccctcgcgccatcagtaggagaccattgagtcagaaatgcagcaaaacccttcagagttaaagcaggagagaggttgtgaggactcacctgaggagacggtgaccagggttccctggccccagtagtcaaagtcgactaggagaccattgagttcaacacagtaataaatggctgcatcctcagtctttaggcagctagtctgcagatccgccgtgctgacagaggtgtccatggagaagacaaaccgtgtgtgaatctgtgggcatacattgggttcaccagggtaggatgatccatcccatccactcaagcccctgtcctggggtctgtcgtatccaattcataccataggtgatgacagtttaaccagacaccttgcaggagaccttcgccgaggccccaggctgcttcacctcaggcccagactgcaccagctgcactcgggagtgggcacctaggagaccattgagtctgagcgggctggcaaggc

SEQ ID NO: 2301 - DNA, 495 bp, Artificial Sequence
  source: /note="Description of Artificial Sequence: Synthetic polynucleotide"
gcctccctcgcgccatcaggacactctcttggttactggcaagctgagtctccctaagtggactcagagagggggtggtgaggactcacctgaggagacggtgaccagggttccctggccccaggggtcgaaccagtcgacgacactctcttggttatcaacagtaatacacggccgtgtcgtcagatctcagcctgctcagctccatgtaggctgtgctgatggacgtgtccctggtcatggtgaccctgccctgaaacttctgtgcatagtttgtgccaccactgttagggttgatccatcccatccactcaagcccttgtccaggggcctgtcgcacccagtgcatatagtagccggtgaaggtgtatccagaagccttgcaggagaccttcactgaggccccaggcttcttcacctcagccccagactgcaccagctgcacctgggagtgggctccgacactctcttggttactgagcgggctggcaaggc

SEQ ID NO: 2302 - DNA, 495 bp, Artificial Sequence
  source: /note="Description of Artificial Sequence: Synthetic polynucleotide"
gcctccctcgcgccatcaggacactctacctcttgctggcaagctgagtctccctaagtggactcagagagggggtggtgaggactcacctgaggagacggtgaccagggttccctggccccaggggtcgaaccagtcgacgacactctacctcttgtcaacagtaatacacagccatgtcctcagatctcaggctgctcagctccatgtaggctgtgctcgcggatgtgtccctggtaatggtgactctgccctggaactcctgtgaatattttgtgttaccattgccagcgttgctccatcccatccactcaagcctttgtccgggggcctggcgcacccaatgcatagcatagctagtgaaggtgtatccagaagccttgcaggaaaccttcactgaggccccaggcttcttcacctcagccccagactgcaccagctgaacctgggagtggacaccgacactctacctcttgctgagcgggctggcaaggc

SEQ ID NO: 2303 - DNA, 495 bp, Artificial Sequence
  source: /note="Description of Artificial Sequence: Synthetic polynucleotide"
gcctccctcgcgccatcaggacactctctgattctctggcaagctgagtctccctaagtggactcagagagggggtggtgaggactcacctgaggagacggtgaccagggttccctggccccaggggtcgaaccagtcgacgacactctctgattcttcaacagtaatacacggccgtgtcctcagatctcaggctgctcagctccatgtaggctgtgcttatggaggtgttcctggtcatggtgactctgccctggaacttctgtgcatagcctgtgttaccactgttagggttcatccatcccatccactcaagcccttgtccagtggcctgtcgcacccagttgatatcataactggtgaaggtgtatccagaagccttgcaggagaccttcactgaggccccaggcttcttcacctcagccccagactgcaccagctgcacctgggagtgggcaccgacactctctgattctctgagcgggctggcaaggc

SEQ ID NO: 2304 - DNA, 495 bp, Artificial Sequence
  source: /note="Description of Artificial Sequence: Synthetic polynucleotide"
gcctccctcgcgccatcaggacactctagtaccgactggcaagctgagtctccctaagtggactcagagagggggtggtgaggactcacctgaggagacggtgaccagggttccctggccccaggggtcgaaccagtcgacgacactctagtaccgatcaacagtaatacacggccgtgtcgtcagatctcaggctcctcagctccatgtaggctgtgctcgtggatgtgtctgtggtcatggtgactctgccctggagcttctgtgcatagtttgtgttaccattgtaagcgctgatccatcccatccactcaagcccttgtccaggggcctgtcgcacccagctgataccatagctggtaaaggtgtaaccagaagccttgcaggagaccttcactgaggccccaggcttcttcacctcagctccagactgcaccagctgaacctgggagtgggcaccgacactctagtaccgactgagcgggctggcaaggc

SEQ ID NO: 2305 - DNA, 495 bp, Artificial Sequence
  source: /note="Description of Artificial Sequence: Synthetic polynucleotide"
gcctccctcgcgccatcaggacactctatccatggctggcaagctgagtctccctaagtggactcagagagggggtggtgaggactcacctgaggagacggtgaccagggttccctggccccaggggtcgaaccagtcgacgacactctatccatggtcaacagtaatacacggccgtgtcctcagatctcaggctgctcagctccatgtaggctgtgtctgtagatgtgtcctcggtcatggtgactctgccctggaacttctgtgcgtagattgtttcaccatcttcaggatcaaaacctcccatccactcaagcccttttccaggagcctgtcgcacccagtgcatggataattcagtgagggtgtatccggaaaccttgcaggagaccttcactgaggccccaggcttcttcacctcagccccagactgtaccagctggacctgggcgtgggtgccgacactctatccatggctgagcgggctggcaaggc

SEQ ID NO: 2306 - DNA, 495 bp, Artificial Sequence
  source: /note="Description of Artificial Sequence: Synthetic polynucleotide"
gcctccctcgcgccatcaggacactctgtagcagtctggcaagctgagtctccctaagtggactcagagagggggtggtgaggactcacctgaggagacggtgaccagggttccctggccccaggggtcgaaccagtcgacgacactctgtagcagttcaacagtaatacatggctgtgtcctcagatctcaggctgctcagctccatgtaggctgtgctcatagacctgtccctggtaatggtgactctgtcctggaatttctgtgcgtagttggtgttaccattgaaaggtgtgatccatcccatccactcaagcgcttgtccgggggcctgtcgcacccagtgcaggtagcggtaggtgaaggtgtatccggaagccttgcaggaaaccttcactgaggacccagtcttcttcacctcagccccagactgcaccagctgcatctgggagtaggcatcgacactctgtagcagtctgagcgggctggcaaggc

SEQ ID NO: 2307 - DNA, 495 bp, Artificial Sequence
  source: /note="Description of Artificial Sequence: Synthetic polynucleotide"
gcctccctcgcgccatcaggacactctatcttcgtctggcaagctgagtctccctaagtggactcagagagggggtggtgaggactcacctgaggagacggtgaccagggttccctggccccaggggtcgaaccagtcgacgacactctatcttcgttcaacagtaatacacggccgtgtcctcagatctcaggctgctcagctccatgtagactgtgctcgtggacgtgtccctggtcatggtgactctgccctggaacttctgtgcgtagcttgtgctaccaccactagggttgattattcccatccactcaagcccttgtccaggggcctgtcgcacccagtgcatatagtagctggtgaaggtgtatccagatgccttgcaggaaaccttcactgaggccccaggcttcttcacctcagccccagactgcaccagctgcacctgggagtgagcaccgacactctatcttcgtctgagcgggctggcaaggc

SEQ ID NO: 2308 - DNA, 495 bp, Artificial Sequence
  source: /note="Description of Artificial Sequence: Synthetic polynucleotide"
gcctccctcgcgccatcaggacactcttccacagtctggcaagctgagtctccctaagtggactcagagagggggtggtgaggactcacctgaggagacggtgaccagggttccctggccccaggggtcgaaccagtcgacgacactcttccacagttcaacagtaatacacggccgtgtcctcggatctcaggctgctcagctccatgtaggctgtgcttgtggacatgtccctggtaatggtgactctttcctggaacttctgtgcgtagtttgtgttaccactgccaacgacgatccatcctatccactcaaggcgttgtccacgagcctgtcgcacccactgcatagcagagctagtaaaggtgaatccagaagccttgcaggagaccttcactgaggtcccaggcttcttcacctcaggcccagactgcaccagctgcatttgggagtgggcaccgacactcttccacagtctgagcgggctggcaaggc

SEQ ID NO: 2309 - DNA, 495 bp, Artificial Sequence
  source: /note="Description of Artificial Sequence: Synthetic polynucleotide"
gcctccctcgcgccatcaggacactctagctagtgctggcaagctgagtctccctaagtggactcagagagggggtggtgaggactcacctgaggagacggtgaccagggttccctggccccaggggtcgaaccagtcgacgacactctagctagtgtcaacagtaatacacggccgtgtcctcagatctcaggctgctcagctccatgtaggctgtgctcgtggatttgtccgcggtaatcgtgactctgccctggaacttctgtgcgtagtttgctgtaccaaagatagggatgatccctcccatccactcaagcccttgtccaggggcctgtcgcacccagctgatagcatagctgctgaaggtgcctccagaagccttgcaggagaccttcaccgaggacccaggcttcttcacctcagccccagactgcaccagctgcacctgggactggacaccgacactctagctagtgctgagcgggctggcaaggc

SEQ ID NO: 2310 - DNA, 495 bp, Artificial Sequence
  source: /note="Description of Artificial Sequence: Synthetic polynucleotide"
gcctccctcgcgccatcaggacactcttaaccaagctggcaagctgagtctccctaagtggactcagagagggggtggtgaggactcacctgaggagacggtgaccagggttccctggccccaggggtcgaaccagtcgacgacactcttaaccaagtcaatagtaatacacagccatgtcctcagatgtcaggctgctcaggtctgtgtaggctgtggttgtggacatgtccctggtcatggtgaatctgccctgaaacttcttggcatagcttgggctaccattgccagggttgatccatcccatccactcaagcccttgtccaggggactgttgcacccaatgtataccgtagctggtgatggtaaacccagaaaaactacaggagactttcactgaggccccagacttcctcacctcagcccaagactgcaccagctggacctgggagtgggcaccgacactcttaaccaagctgagcgggctggcaaggc

SEQ ID NO: 2311 - DNA, 495 bp, Artificial Sequence
  source: /note="Description of Artificial Sequence: Synthetic polynucleotide"
gcctccctcgcgccatcaggacactctcaagaggtctggcaagctgagtctccctaagtggactcagagagggggtggtgaggactcacctgaggagacggtgaccagggttccctggccccaggggtcgaaccagtcgacgacactctcaagaggttcaacagtaatacacggccgtgtcctcagatctcaggctgctcagctccatgtaggctgtgtctgtagacgtgtccgcggttatggtgactctgccctggaacttctctgcgtatattgtttcaccatcttcaggatcaacaagtcccatccactcaagcccttttccaggggcctgttgcacccagtgcatgtagtagtcggtgaaggtgtatccagaaaccttgcaggagattttcactgtagccccaggcttcttcacctcagccccagactgtaccagctggacctcggcgtgggtgccgacactctcaagaggtctgagcgggctggcaaggc

SEQ ID NO: 2312 - DNA, 495 bp, Artificial Sequence
  source: /note="Description of Artificial Sequence: Synthetic polynucleotide"
gcctccctcgcgccatcaggacactctagttgaccctggcaagctgagtctccctaagtggactcagagagggggtggtgaggactcacctgaggagacggtgaccagggttccctggccccaggggtcgaaccagtcgacgacactctagttgacctcatgcacagtaatatgtggctgtgtccacagggtccatgttggtcattgtaaggaccacctggtttttggaggtgtccttggtgatggtgagcctgctcttcagagatgggctgtagcgcttatcatcattccaataaatgagtgcaagccactccagggcctttcctgggggctgacggatccagcccacacccactccactagtgctgagtgagaacccagagaaggtgcaggtcagcgtgagggtctgtgtgggtttcaccagcgtaggaccagactccttcaaggtgatctgggacaagacactctagttgaccctgagcgggctggcaaggc

SEQ ID NO: 2313 - DNA, 495 bp, Artificial Sequence
  source: /note="Description of Artificial Sequence: Synthetic polynucleotide"
gcctccctcgcgccatcaggacactctcagcatatctggcaagctgagtctccctaagtggactcagagagggggtggtgaggactcacctgaggagacggtgaccagggttccctggccccaggggtcgaaccagtcgacgacactctcagcatattcatgcacagtaatatgtggctgtgtccacagggtccatgttggtcatggtaaggaccacctggcttttggaggtgtccttggagatggtgagcctgctcttcagagatgtgctgtaggatttttcgtcattcgaaaaaatgtgtgcaagccactccagggccttccctgggggctgacggatccagctcacacccattctagcattgctgagtgagaacccagagacggtgcaggtcagcgtgagggtctctgtgggtttcaccagcacaggaccagactccttcaaggtgacctgggacaagacactctcagcatatctgagcgggctggcaaggc

SEQ ID NO: 2314 - DNA, 495 bp, Artificial Sequence
  source: /note="Description of Artificial Sequence: Synthetic polynucleotide"
gcctccctcgcgccatcaggacactctgcaggattctggcaagctgagtctccctaagtggactcagagagggggtggtgaggactcacctgaggagacggtgaccagggttccctggccccaggggtcgaaccagtcgacgacactctgcaggatttcatgcacaataatacgtggctgtgtccacagggtccatgttggtcattgtaaggaccacctggtttttggaggtgtccttggagatggtgagcctggtcttcagagatgtgctgtagtatttatcatcatcccaatcaatgagtgcaagccactccagggccttccctgggggctgacggatccagctcacacacattccactagtgctgagtgagaacccagagaaggtgcaggtcagtgtgagggtctgtgtgggtttcaccagcgcaggaccagactccctcaaggtgacctgggataagacactctgcaggattctgagcgggctggcaaggc

SEQ ID NO: 2315 - DNA, 495 bp, Artificial Sequence
  source: /note="Description of Artificial Sequence: Synthetic polynucleotide"
gcctccctcgcgccatcaggacactctgtccattcctggcaagctgagtctccctaagtggactcagagagggggtggtgaggactcacctgaggagacggtgaccagggttccctggccccaggggtcgaaccagtcgacgacactctgtccattctcaacagtaatacacagccgtgtcctcggctctcaggctgttcatttgcagatacagtgagttcttggcgttgtctctggagatggtgaatcggcccttcacagagtccacatagtatttctcacttccatcttgctttatgttggccacccactccagccccttccctggagcctggcggacccagctcatccaatagctactaaaggtgaatccagaggctgcacaggagagtctcagggaccccccaggctggaccaagcctcccccagactccaccagctgcacctcacactggacaccgacactctgtccattcctgagcgggctggcaaggc

SEQ ID NO: 2316 - DNA, 495 bp, Artificial Sequence
  source: /note="Description of Artificial Sequence: Synthetic polynucleotide"
gcctccctcgcgccatcaggacactctgcataactctggcaagctgagtctccctaagtggactcagagagggggtggtgaggactcacctgaggagacggtgaccagggttccctggccccaggggtcgaaccagtcgacgacactctgcataacttcatgcacagtaatacaaggccgtgtcctcagctctcagactgttcatttgcagatacagggagttcttggcgttgtctctggagatggtgaatcggcccttcacagagtccgcatagcctatgctaccactattccaactaatacctgagacccactccaggcccttccctggagcttgccggacccagtgcatggcataatcatcaaaggtgaatccagaggctgcacaggagagtctcagggacctgccaggctgtaccaagcctcccccagactccaccagctgcacttcacactggacgacactctgcataactctgagcgggctggcaaggc

SEQ ID NO: 2317 - DNA, 495 bp, Artificial Sequence
  source: /note="Description of Artificial Sequence: Synthetic polynucleotide"
gcctccctcgcgccatcaggacactctatatgctgctggcaagctgagtctccctaagtggactcagagagggggtggtgaggactcacctgaggagacggtgaccagggttccctggccccaggggtcgaaccagtcgacgacactctatatgctgtcaacagtaatacacggccgtgtcctcggctctcaggctgttcatttgcagatacagtgagttcttggcgttgtccctggagatggtgaatcggcccttcacagagtctgcgtagtatatggtactaccactactactaatgtatgaaacccactccagccccttccctggagcctggcggatccagctcatgtagtagtcactgaaggtgaatccagaggctgcacaggagagtctcagggaccctccaggcttgaccaagcctcccccagactccaccagctgcacctgacactggacaccgacactctatatgctgctgagcgggctggcaaggc

SEQ ID NO: 2318 - DNA, 495 bp, Artificial Sequence
  source: /note="Description of Artificial Sequence: Synthetic polynucleotide"
gcctccctcgcgccatcaggacactctaatcctgcctggcaagctgagtctccctaagtggactcagagagggggtggtgaggactcacctgaggagacggtgaccagggttccctggccccaggggtcgaaccagtcgacgacactctaatcctgctcaacagtaatacacagccgtgtccccggctctcaggctgttcatttgaagatacaaggagttcttggcattttctctggagatggtgaatcggcccttcacggagcctggatagtatgtgtcaccagcagtaccaatagctgagacccactccagaccttttcctgtagcttggcggacccagtgcatgtcgtagctactgaaggtgaatccagaggctgcacaggagagtctcagggaccccccaggctgtaccaagcctcccccagactccaccagctgcacctcacactggacacctgcgacactctaatcctgcctgagcgggctggcaaggc

SEQ ID NO: 2319 - DNA, 495 bp, Artificial Sequence
  source: /note="Description of Artificial Sequence: Synthetic polynucleotide"
gcctccctcgcgccatcaggacactcttgagacctctggcaagctgagtctccctaagtggactcagagagggggtggtgaggactcacctgaggagacggtgaccagggttccctggccccaggggtcgaaccagtcgacgacactcttgagaccttcaacagtaatacacggctgtgtcctcggttttcaggctgttcatttgcagatacagcgtgttttttgaatcatctcttgagatggtgaatctgcctttcacgggtgcagcgtagtctgttgtcccaccatcagttttgcttttaatacggccaacccactccagccccttccctggagcctggcggacccagctcatccaggcgttactgaaagtgaatccagaggctgcacaggagagtctaagggaccccccaggctttaccaagcctcccccagactccaccagctgcacctcacactggacactcttgagacctctgagcgggctggcaaggc

SEQ ID NO: 2320 - DNA, 495 bp, Artificial Sequence
  source: /note="Description of Artificial Sequence: Synthetic polynucleotide"
gcctccctcgcgccatcaggacactctgaatggacctggcaagctgagtctccctaagtggactcagagagggggtggtgaggactcacctgaggagacggtgaccagggttccctggccccaggggtcgaaccagtcgacgacactctgaatggactcaacagtaatacacagccatgtcctcggctctccgtctgttcttttgcagatacagggagttcctggaattgtctctggagatgatgaatcggcgcttcacggagtccacatagtgcgtcctactgccattccaactaacacccgatacccactccagcccctttcctggagccttgcgggcccagttcatgtcactgttactgaaggtgaatccagaggctgcacaggagagtctcagggaccccccaggctgtaccaagcctcccccagactccaccagctgcacctcacactggacaccgacactctgaatggacctgagcgggctggcaaggc

SEQ ID NO: 2321 - DNA, 495 bp, Artificial Sequence
  source: /note="Description of Artificial Sequence: Synthetic polynucleotide"
gcctccctcgcgccatcaggacactctcacatggactggcaagctgagtctccctaagtggactcagagagggggtggtgaggactcacctgaggagacggtgaccagggttccctggccccaggggtcgaaccagtcgacgacactctcacatggatcaacagtgatacaaggccgtgtcctcggctctcagactgttcatttgcagatacagggagttcttggcgttgtctctggagatggtgaatcggcccttcacagagtctgcataacctgtgctaccaccattccaattaataccagagacccactccagccccttccctggagcttggcggacccagctcatgccataatcatcaaaggtgaatccagaggctgcacaggagagtctcagggaccccccaggccgtaccacacctcccccagactccaccagctgcacctcacactggacaccgacactctcacatggactgagcgggctggcaaggc

SEQ ID NO: 2322 - DNA, 495 bp, Artificial Sequence
  source: /note="Description of Artificial Sequence: Synthetic polynucleotide"
gcctccctcgcgccatcaggacactctttgaccatctggcaagctgagtctccctaagtggactcagagagggggtggtgaggactcacctgaggagacggtgaccagggttccctggccccaggggtcgaaccagtcgacgacactctttgaccattcaacagtaatacacagccgtgtcctcggctctcaggctgttcatttgcagatacagtgagttcttggcgttgtctctggagatggtgaatcggcccttcactgagtctgcgtagtatatgtaactactactactactaatggatgagacccactccagccccttccctggagcctggcggacccagttcatgctatagctactgaaggtgaatccagaggctgcacaggagagtctcagggaccccccaggcttgaccaggcctcccccagactccaccagctgcacctcacactggacaccgacactctttgaccatctgagcgggctggcaaggc

SEQ ID NO: 2323 - DNA, 495 bp, Artificial Sequence
  source: /note="Description of Artificial Sequence: Synthetic polynucleotide"
gcctccctcgcgccatcaggacactctaagccatcctggcaagctgagtctccctaagtggactcagagagggggtggtgaggactcacctgaggagacggtgaccagggttccctggccccaggggtcgaaccagtcgacgacactctaagccatctcaacagtaatatacggccgtgtcctcggctctcaggctgttcatttgcagatacagcgtgttcttggaattgtctctggagatggtgaaccggcccttcacggagtctgcgtagtatgtgctaccaccactaccactaatagctgagacccactccagccccttccctggagcctggcggacccagctcatggcatagctgctaaaggtgaatccagaggctgcacaggagagtctcagggaccccccaggctgtaccaagcctcccccagactccaacagctgcacctcacactggacaccgacactctaagccatcctgagcgggctggcaaggc

SEQ ID NO: 2324 - DNA, 495 bp, Artificial Sequence
  source: /note="Description of Artificial Sequence: Synthetic polynucleotide"
gcctccctcgcgccatcaggacactcttccatgtgctggcaagctgagtctccctaagtggactcagagagggggtggtgaggactcacctgaggagacggtgaccagggttccctggccccaggggtcgaaccagtcgacgacactcttccatgtgtcaacagtaatacacagccgtgtcctcagctctcaggctgttcatttgcagatacagcgtgttcttggaattgtctctggagatggtgaatcggcccttcacggagtctgcatagtatttattacttccatcatatgatataactgccacccactccagccccttgcctggagcctggcggacccagtgcatgccatagctactgaaggtgaatccagaggctgcacaggagagtctcagggacctcccaggctggaccacgcctcccccagactccaccagctgcacctgacactggacaccgacactcttccatgtgctgagcgggctggcaaggc

SEQ ID NO: 2325 - DNA, 495 bp, Artificial Sequence
  source: /note="Description of Artificial Sequence: Synthetic polynucleotide"
gcctccctcgcgccatcaggacactctcaagtcacctggcaagctgagtctccctaagtggactcagagagggggtggtgaggactcacctgaggagacggtgaccagggttccctggccccaggggtcgaaccagtcgacgacactctcaagtcactcaacagtaatacacagccgtgtcctcagctctcaggctgttcatttgcagatacagcgtgttcttggaattgtctctggagatggtgaatcggcccttcacggagtctgcatagtatttattacttccatcatatgatataactgccacccactccagccccttgcctggagcctggcggacccagtgcatgccatagctactgaaggtgaatccagaggctgcacaggagagtctcagggacctcccaggctggaccacgcctcccccagactccaccagctgcacctgacactggacaccgacactctcaagtcacctgagcgggctggcaaggc

SEQ ID NO: 2326 - DNA, 495 bp, Artificial Sequence
  source: /note="Description of Artificial Sequence: Synthetic polynucleotide"
gcctccctcgcgccatcaggacactctctgcaatcctggcaagctgagtctccctaagtggactcagagagggggtggtgaggactcacctgaggagacggtgaccagggttccctggccccaggggtcgaaccagtcgacgacactctctgcaatctcaacagtaatacacagccgtgtcctcggctctcaggctgttcatttgcagatacagcgtgttcttggaattgtctctggagatggtgaatcggcccttcacggagtctgcatagtatttattacttccatcataccatataactgccacccactccagccccttgcctggagcctggcggacccagtgcatgccatagctactgaaggtgaatccagacgctgcacaggagagtctcagggacctcccaggctggaccacgcctcccccagactccaccagctgcacctgacactggacaccgacactctctgcaatcctgagcgggctggcaaggc

SEQ ID NO: 2327 - DNA, 495 bp, Artificial Sequence
  source: /note="Description of Artificial Sequence: Synthetic polynucleotide"
gcctccctcgcgccatcaggacactctatcgacgactggcaagctgagtctccctaagtggactcagagagggggtggtgaggactcacctgaggagacggtgaccagggttccctggccccaggggtcgaaccagtcgacgacactctatcgacgatcaacagtaatacacagccgtgtcctcggccctcaggctattcgtttgcagatacagggtgttcctggaattgtctctggagatgatgaatcggcccttcacagagtctgcatagtgcgtcctactgccattccaactaacacccgatacccactccagcccctttcctggagcctgatggacccagttcatgtcactgttactgaaggtgaatccagaggctgcacaggagagtctcagggatcccccaggctgtaccaagcctcccccagactccaccagctgcacctcacactggacaccgacactctatcgacgactgagcgggctggcaaggc

SEQ ID NO: 2328 - DNA, 495 bp, Artificial Sequence
  source: /note="Description of Artificial Sequence: Synthetic polynucleotide"
gcctccctcgcgccatcaggacactctacagactgctggcaagctgagtctccctaagtggactcagagagggggtggtgaggactcacctgaggagacggtgaccagggttccctggccccaggggtcgaaccagtcgacgacactctacagactgtcaacagtaatacacggccgtgccctcagctctcaggttgttcatttgaagatacagcgtgttcttggaattgtctctggagatggtgaatctgcccttcctggagtctgcgtagtatgtgctaccaccactaatggatgagacccactccagccccttccctggagcctggcggatccagctcatctcattgctactgacggtgaatccagaggctgcacaggagagtctcagggaccccctaggctgtaccaagcctcccccagactccaccagctgcacctcacactggacacctgcaaagacactctacagactgctgagcgggctggcaaggc

SEQ ID NO: 2329 - DNA, 495 bp, Artificial Sequence
  source: /note="Description of Artificial Sequence: Synthetic polynucleotide"
gcctccctcgcgccatcaggacactctccttatagctggcaagctgagtctccctaagtggactcagagagggggtggtgaggactcacctgaggagacggtgaccagggttccctggccccaggggtcgaaccagtcgacgacactctccttatagtcatgcacagtaatacaaggcggtgtcctcagttctcagactgttcatttgcagatacagggagtttttgctgttgtctctggagatggtgaatcggcccttcacagagtctgcatagtatgtgctaccaccatcccaactaataagagagacccactccagacccttccccggagcttgacggacccagtgcatggtataatcatcaaaggtgaatccagaggctgcacaggagagtctcagggaccccccaggctgtaccacgactcccccagactccaccagctgcacttcacactggacgacactctccttatagctgagcgggctggcaaggc

SEQ ID NO: 2330 - DNA, 495 bp, Artificial Sequence
  source: /note="Description of Artificial Sequence: Synthetic polynucleotide"
gcctccctcgcgccatcaggacactcttacgcgttctggcaagctgagtctccctaagtggactcagagagggggtggtgaggactcacctgaggagacggtgaccagggttccctggccccaggggtcgaaccagtcgacgacactcttacgcgtttcaacagtaatacacagccgtgtcctcgtctctcaggctgttcatttgcagatacagtgagttcttggcattgtctctggagatggtgaatcggcccttcacagagtctgcgtagtatatggtactactactactactaatgtatgaaacccactccagccccttccctggagcctggcggacccagttcatgctatagctactgaaggtgaatccagaggctgcacaggagagtctcagggaccccccaggctgtaccaagcctcccccagactccaccagctgcacctcacactggacaccgacactcttacgcgttctgagcgggctggcaaggc

SEQ ID NO: 2331 - DNA, 495 bp, Artificial Sequence
  source: /note="Description of Artificial Sequence: Synthetic polynucleotide"
gcctccctcgcgccatcaggacactctctataaggctggcaagctgagtctccctaagtggactcagagagggggtggtgaggactcacctgaggagacggtgaccagggttccctggccccaggggtcgaaccagtcgacgacactctctataaggtcaacagtaatacacggctgtgtcctcggttttcaggctgttcatttgcagataggcgatgcttttggaatcatctcttgagatggtgaatctgcctttcacagacgcggcgtattctgttgtcccaccataagctttgcttctaatgaaacctacccactccagccccttccctggagcctggcggaaccagctcatagcataatcaccaaaggtgaatccagaagctgtacaggagagtctcagggaccgccctggctgtaccaagcctcccccagactccaccagctgcacctcacattggacactctctataaggctgagcgggctggcaaggc

SEQ ID NO: 2332 - DNA, 495 bp, Artificial Sequence
  source: /note="Description of Artificial Sequence: Synthetic polynucleotide"
gcctccctcgcgccatcaggacactcttcttagtcctggcaagctgagtctccctaagtggactcagagagggggtggtgaggactcacctgaggagacggtgaccagggttccctggccccaggggtcgaaccagtcgacgacactcttcttagtctcaacagtaatacacggccgtgtcctcggctctcaggctgttcatttgaagatacagcgtgttcttggaattgtctctggagatggtgaatcggcccttcacggagtctgcgtagtatgtgctaccaccgctataaataactgagacccactccagccccttccctggagcctggcggacccagctcatgtagttgctactgacggtgaacccagaggctgcacaggagagtctcagggaccccccaggctggatcaagcctcctccagactccaccagctgcacctcacactggacacctgcgacactcttcttagtcctgagcgggctggcaaggc

SEQ ID NO: 2333 - DNA, 495 bp, Artificial Sequence
  source: /note="Description of Artificial Sequence: Synthetic polynucleotide"
gcctccctcgcgccatcaggacactcttgtctgcactggcaagctgagtctccctaagtggactcagagagggggtggtgaggactcacctgaggagacggtgaccagggttccctggccccaggggtcgaaccagtcgacgacactcttgtctgcatcaacagtaatacacagccatgtcctcagctctcaggctgcccatttgaagatacagcgtgttcttggaattgtctctggagatggtgaatctgcccttcacagagtctgcataatatgtgctacccccattactactaatagctgaaacatattccagtcccttccctggagcctggcggacccagtgcatagcatagctactgaaggtgaatccagaggctgcacaggagagtctcagggaccccccaggctggaccaagccttccccagactccaccagctgcacctcacactggacaccgacactcttgtctgcactgagcgggctggcaaggc

SEQ ID NO: 2334 - DNA, 495 bp, Artificial Sequence
  source: /note="Description of Artificial Sequence: Synthetic polynucleotide"
gcctccctcgcgccatcaggacactctgccattaactggcaagctgagtctccctaagtggactcagagagggggtggtgaggactcacctgaggagacggtgaccagggttccctggccccaggggtcgaaccagtcgacgacactctgccattaatcaacagtaatacacagccgtgtcctcagctctcaggctgttcatttgaagatacagcgtgttcttggaattgtctctggagatggtgaatcggcccttcacggagtctgcgtagtatgtgctaccacagctataaataactgagacccactccagccccttccctggagcctggcggacccagctcatgtagttgctactgacggtgaacccagaggctgcacaggagagtctcagggaccccccaggctggatcaagcctcctccagactccaccagctgcacctcacactggacacctgcgacactctgccattaactgagcgggctggcaaggc

SEQ ID NO: 2335 - DNA, 495 bp, Artificial Sequence
  source: /note="Description of Artificial Sequence: Synthetic polynucleotide"
gcctccctcgcgccatcaggacactctgactaagactggcaagctgagtctccctaagtggactcagagagggggtggtgaggactcacctgaggagacggtgaccagggttccctggccccaggggtcgaaccagtcgacgacactctgactaagatcaacagtaatacacggccgtgtcctcggttttcaggctgttcatttgcagatacagtgagttctttgaatcatctcttgagatggtgaatctgcctttcacagacgcggcgtattctgtggtgtaactgttagctttgtttctagtacggccaacccactccagccccttccctggagcctggcggacccagtccatgtagtggtcactgaaggtgaatccagaggctgcacaggagagtctcagggaccctccaggctggaccaagcctcccccagactccaccagctgcacctcacactggacactctgactaagactgagcgggctggcaaggc

SEQ ID NO: 2336 - DNA, 495 bp, Artificial Sequence
  source: /note="Description of Artificial Sequence: Synthetic polynucleotide"
gcctccctcgcgccatcaggacactctaggttgctctggcaagctgagtctccctaagtggactcagagagggggtggtgaggactcacctgaggagacggtgaccagggttccctggccccaggggtcgaaccagtcgacgacactctaggttgcttcaacagtaatacacggccgtgtcctcggttttcaggctgttcatttgcagatacgccgtgttctttgaatcatctctggagatggtgaacctgcctttcaccgacgcagcatatgctgtcgcgtaactgttagctttgcttctaatacggccaacccactccagccctttcccggaagcctggcggacccagtgcatagcagagccactgaaggtgaacccagaggctgcacaggagagtttcagggaccccccaggctggaccaagcctcccccggactccaccagctgcacctcacactggacactctaggttgctctgagcgggctggcaaggc

SEQ ID NO: 2337 - DNA, 495 bp, Artificial Sequence
  source: /note="Description of Artificial Sequence: Synthetic polynucleotide"
gcctccctcgcgccatcaggacactctctcgagaactggcaagctgagtctccctaagtggactcagagagggggtggtgaggactcacctgaggagacggtgaccagggttccctggccccaggggtcgaaccagtcgacgacactctctcgagaatcaacagtaatacacagccgtgtcctcggctctcagactgttcatttgcagatacagcgtgttcttggcgttgtctctggagatggtgaatcggcccttcacggagtccgcgtagcttgtgctactcccatcactattaatacgtgagacccacaccagccccttccctggagcttggcggacccagtgcatccagtagctactgaaggtgaatccagaggctgcacaggagagtctcagggaccccccaggctgaactaagcctcccccggactccaccagctgcacctcacactggacaccgacactctctcgagaactgagcgggctggcaaggc

SEQ ID NO: 2338 - DNA, 495 bp, Artificial Sequence
  source: /note="Description of Artificial Sequence: Synthetic polynucleotide"
gcctccctcgcgccatcaggacactctttaatggcctggcaagctgagtctccctaagtggactcagagagggggtggtgaggactcacctgaggagacggtgaccagggttccctggccccaggggtcgaaccagtcgacgacactctttaatggctcaacagtaatacacagccgtgtcctcagctctcaggctgttcatttgcagatacagcgtgttcttggaattgtctctggagatggtgaatcggcccttcacggagtctgcatagtatttattacttccatcataccgtataaatgccacccactccagccccttgcctggagcctggcggacccagtgcatgccatagctactgaaggtgaatccagacgctgcacaggagagtctcagggaccccccaggctggaccacgcctcccccagactccaccagctgcacctgacactggacaccgacactctttaatggcctgagcgggctggcaaggc

SEQ ID NO: 2339 - DNA, 495 bp, Artificial Sequence
  source: /note="Description of Artificial Sequence: Synthetic polynucleotide"
gcctccctcgcgccatcaggacactcttgcagacactggcaagctgagtctccctaagtggactcagagagggggtggtgaggactcacctgaggagacggtgaccagggttccctggccccaggggtcgaaccagtcgacgacactcttgcagacatcaacagtaatacacagccgtgtcctcagctctcaggctgttcatttgaagatgcagcgtgttcttggaattgtctctggagatggtgaatctgcccttcctggagtctgcgtagtatgtgctaccaccactaatggatgagacccactccagacccttccctggagcctggcggacccagctcatctcattgctactgacggtgaatccagaggctgcacaggagagtctcagggaccccccaggctgtaccaagactccccgagactccaccagctgcacctcacactggacacctgcaaagacactcttgcagacactgagcgggctggcaaggc

SEQ ID NO: 2340 - DNA, 495 bp, Artificial Sequence
  source: /note="Description of Artificial Sequence: Synthetic polynucleotide"
gcctccctcgcgccatcaggacactcttcactgagctggcaagctgagtctccctaagtggactcagagagggggtggtgaggactcacctgaggagacggtgaccagggttccctggccccaggggtcgaaccagtcgacgacactcttcactgagtcaacagtaatacacggccgtgtccgcggcggtcacagagctcagcttcagggagaactggttcttggacgtgtctactgacatggtgactcgactcttgagggaggggttgtagttggtgctcccactggtatagatacgcccaatccactccagtcccttcccggcgggctgccggatccagctccagtagtaactactgatggagccaccagagacagtgcaggtgagggacagggtctccgaaggcttcaccagtcctgggcccgactcctgcagctgcacctgggacaggacccctgtgacactcttcactgagctgagcgggctggcaaggc

SEQ ID NO: 2341 - DNA, 495 bp, Artificial Sequence
  source: /note="Description of Artificial Sequence: Synthetic polynucleotide"
gcctccctcgcgccatcaggacactctgagtacgtctggcaagctgagtctccctaagtggactcagagagggggtggtgaggactcacctgaggagacggtgaccagggttccctggccccaggggtcgaaccagtcgacgacactctgagtacgttcaacagtaatacacggccgtgtccacggcggtcacagagctcagcttcagggagaactggttcttggacgtgtctactgacatggtgactcgactcttgagggacgggttgtagtaggtgctcccactataatagatgtacccaatccactccagtcccttccctgggggctgccggatccagccccaccagttactactgctgatggagtaaccagagacagcgcaggtgagggacagggtgtccgaaggcttcaccagtcctgggcccgactcctgcagctgcacctgggacaggaccacgacactctgagtacgtctgagcgggctggcaaggc

SEQ ID NO: 2342 - DNA, 495 bp, Artificial Sequence
  source: /note="Description of Artificial Sequence: Synthetic polynucleotide"
gcctccctcgcgccatcaggacactctatacgccactggcaagctgagtctccctaagtggactcagagagggggtggtgaggactcacctgaggagacggtgaccagggttccctggccccaggggtcgaaccagtcgacgacactctatacgccatcaacagtaatacacggccgtgtccgcggcggtcacagagctcagcttcagggagaactggttcttggacctgtctactgatatggtgactcgactcttgagggacgggttgtagtaggtgctcccactatgatagatgtacccaatccactccaggcccttccctggtggctgccggatccagctccaggagtaaccaccactgctgatggagccaccagagacagcgcaggtgagggacagggtctgtgaaggcttcaccagtcctgagccggactcctgcagctgcagctgggacaggacgacactctatacgccactgagcgggctggcaaggc

SEQ ID NO: 2343 - DNA, 495 bp, Artificial Sequence
  source: /note="Description of Artificial Sequence: Synthetic polynucleotide"
gcctccctcgcgccatcaggacactcttcgcatcactggcaagctgagtctccctaagtggactcagagagggggtggtgaggactcacctgaggagacggtgaccagggttccctggccccaggggtcgaaccagtcgacgacactcttcgcatcatcaacagtaatacacggccgtgtctgcggcagtcacagagctcagcttcagggagaactggttcttggacgtgtctactgatatggtaactcgactcttgagggacgggttgtagtaggtgctcccactgtaatagatgtacccaatccactccaggcccttccctgggggctggcggatccaactccagtagtaatcaccactgctgatggagccaccagagacagtgcaggtgagggacagggtctgtgaaggcttcaccagtcctgggcccgactcctgcagctgcacctgggacaggacgacactcttcgcatcactgagcgggctggcaaggc

SEQ ID NO: 2344 - DNA, 495 bp, Artificial Sequence
  source: /note="Description of Artificial Sequence: Synthetic polynucleotide"
gcctccctcgcgccatcaggacactctcgcttaatctggcaagctgagtctccctaagtggactcagagagggggtggtgaggactcacctgaggagacggtgaccagggttccctggccccaggggtcgaaccagtcgacgacactctcgcttaattcaacagtaatacacggccgtgtccgcggcagtcacagagctcagcttcagggagaactggttcttagacgtgtctactgatatggtaactcgactcttgagggacgggttgtagtaggtgctcccactgtaatagatgtacccaatccactccaggcccttccctgggtgctggcggatccagctccagtagtaaccaccactgctgatggagccaccagagacagtacaggtgagggacagggtctgtgaaggcttcaccagtcctgggcccgactcctgcagctgcacctggggcaggacgacactctcgcttaatctgagcgggctggcaaggc

SEQ ID NO: 2345 - DNA, 495 bp, Artificial Sequence
  source: /note="Description of Artificial Sequence: Synthetic polynucleotide"
gcctccctcgcgccatcaggacactcttggttatcctggcaagctgagtctccctaagtggactcagagagggggtggtgaggactcacctgaggagacggtgaccagggttccctggccccaggggtcgaaccagtcgacgacactcttggttatctcaacagtaatacacagccgtgtccgcggcggtcacagagctcagcttcagggagaactggttcttggacgtgtctactgatatggtgactcgactcttgagggacgggttgtagttggtgcttccactatgattgatttccccaatccactccagccccttccctgggggctggcggatccagctccagtagtaaccactgaaggacccaccatagacagcgcaggtgagggacagggtctccgaaggcttcaacagtcctgcgccccactgctgtagctgcacctgggacaggacccctgtgacactcttggttatcctgagcgggctggcaaggc

SEQ ID NO: 2346 - DNA, 495 bp, Artificial Sequence
  source: /note="Description of Artificial Sequence: Synthetic polynucleotide"
gcctccctcgcgccatcaggacactctggattgctctggcaagctgagtctccctaagtggactcagagagggggtggtgaggactcacctgaggagacggtgaccagggttccctggccccaggggtcgaaccagtcgacgacactctggattgcttcaacagtaatacacagccgtgtctgcggcggtcacagagctcagcttcagggagaactggttcttggacgtgtctacggatatggtgactcgactcttgagggacgggttgtagtaggtgctcccactataatagatactcccaatccactccagccccttccctgggggctggcggatccagccccagtagtaactactactgctgatggagccaccagagacagtgcaggtgagggacagggtctccgaaggcttcaccagtcctgggcccgactcctgcagctgcagctgggacaggacgacactctggattgctctgagcgggctggcaaggc

SEQ ID NO: 2347 - DNA, 495 bp, Artificial Sequence
  source: /note="Description of Artificial Sequence: Synthetic polynucleotide"
gcctccctcgcgccatcaggacactctctcagtgactggcaagctgagtctccctaagtggactcagagagggggtggtgaggactcacctgaggagacggtgaccagggttccctggccccaggggtcgaaccagtcgacgacactctctcagtgatcaacagtaatacacggccgtgtccgcagcggtcacagagctcagcttcagggagaactggttcttggacgtgtctactgatatggtgactcgactcttgagggaggggttgtagttggtgctcccactgtaatagatatacccaatccactccagtcccttccctgggggctgccggatccagctccagtagtaactactgatggagccaccagagacagtgcaggtgagggacagggtctccgaaggcttcaccagtcctgggcccgactcctgcagctgcacctgggacaggacccctgtgacactctctcagtgactgagcgggctggcaaggc

SEQ ID NO: 2348 - DNA, 495 bp, Artificial Sequence
  source: /note="Description of Artificial Sequence: Synthetic polynucleotide"
gcctccctcgcgccatcaggacactctacgtactcctggcaagctgagtctccctaagtggactcagagagggggtggtgaggactcacctgaggagacggtgaccagggttccctggccccaggggtcgaaccagtcgacgacactctacgtactctcaacagtaatacacggccgtgtccgcagcggtcacagagctcagcttcagggagaactggttcttggacgtgtctactgatatggtgactcgactcttgagggaggggttgtagttggtgctcccactgtaatagatatacccaatccactccagtcccttccctgggggctgccggatccagctccagtagtaaccaccactgctgacggagccaccagagacagtgcaggtgagggacagggtctccgaaggcttcaccagtcctgggcccgactcctgcagctgcacctgggacaggacgacactctacgtactcctgagcgggctggcaaggc

SEQ ID NO: 2349 - DNA, 495 bp, Artificial Sequence
  source: /note="Description of Artificial Sequence: Synthetic polynucleotide"
gcctccctcgcgccatcaggacactcttgatgcgactggcaagctgagtctccctaagtggactcagagagggggtggtgaggactcacctgaggagacggtgaccagggttccctggccccaggggtcgaaccagtcgacgacactcttgatgcgatcaacagtaatacacggccgtgtctgcggcggtcacagagctcagcttcagggagaactggttcttggacgtgtctactgatatggtgactcgactcttgagggacgggttgtagtaggtgctcccactatgatagatactcccaatccactccagccccttccctgggggctgccggatccagccccagtagtaaccactgctgatggagtaaccagagacagcgcaggtgagggacagggtctccgaaggcttcaccagtcctgggcccgactcctgcagctgcacctgggacaggaccccgacactcttgatgcgactgagcgggctggcaaggc

SEQ ID NO: 2350 - DNA, 495 bp, Artificial Sequence
  source: /note="Description of Artificial Sequence: Synthetic polynucleotide"
gcctccctcgcgccatcaggacactctattaagcgctggcaagctgagtctccctaagtggactcagagagggggtggtgaggactcacctgaggagacggtgaccagggttccctggccccaggggtcgaaccagtcgacgacactctattaagcgtcaacagtaatacatggcggtgtccgaggccttcaggctgctccactgcaggtaggcggtgctgatggacttgtcggctgagatggtgacctggccttggaaggacgggctgtatctggtatcagagtcaccaggatagatgatccccatccactccaggcctttcccgggcatctggcgcacccagccgatccagtagctggtaaagctgtatccagaacccttacaggagatcttcagagactccccgggctttttcacctctgctccagactgcaccagctgcacctcggcacagactccgacactctattaagcgctgagcgggctggcaaggc

SEQ ID NO: 2351 - DNA, 495 bp, Artificial Sequence
  source: /note="Description of Artificial Sequence: Synthetic polynucleotide"
gcctccctcgcgccatcaggacactctagcaatccctggcaagctgagtctccctaagtggactcagagagggggtggtgaggactcacctgaggagacggtgaccagggttccctggccccaggggtcgaaccagtcgacgacactctagcaatcctcaacagtaatacatggcggtgtccgaggccttcaggctgctccactgcaggtaggcagtgctgatggacttgtcagctgagatggtgacgtggccttggaaggacgggctgtagttggtataagagtcactaggatcaatcctccccatccactccaagcctttcccgggcatctggcgcacccagctgatccagtagctggtaaagctgtatccagaacccttacaggagatcctcagagactccccgggctttttcacctctgctccagactgcaccagctgcacttcggcacagactccgacactctagcaatccctgagcgggctggcaaggc

SEQ ID NO: 2352 - DNA, 495 bp, Artificial Sequence
  source: /note="Description of Artificial Sequence: Synthetic polynucleotide"
gcctccctcgcgccatcaggacactctgcttagtactggcaagctgagtctccctaagtggactcagagagggggtggtgaggactcacctgaggagacggtgaccagggttccctggccccaggggtcgaaccagtcgacgacactctgcttagtatcaacagtaatacacagccgtgtcctcgggagtcacagagttcagctgcagggagaactggttcttggatgtgtctgggttgatggttattcgacttttcacagatactgcataatcattataccacttggacctgtagtatgtccttcccagccactcaaggcctctcgatggggactgcctgatccagttccaagcagcactgttgctagagacactgtccccggagatggcacaggtgagtgagagggtctgcgagggcttcaccagtcctggacctgactgctgcagctgtacctgtgagacactctgcttagtactgagcgggctggcaaggc

SEQ ID NO: 2353 - DNA, 495 bp, Artificial Sequence
  source: /note="Description of Artificial Sequence: Synthetic polynucleotide"
gcctccctcgcgccatcaggacactcttgaccttgctggcaagctgagtctccctaagtggactcagagagggggtggtgaggactcacctgaggagacggtgaccagggttccctggccccaggggtcgaaccagtcgacgacactcttgaccttgtcaacagtaatacacggcagtgtcctcagcctttaggctgcagatctgcagatatgccgtgctgacagaggtgtccaaggagaagacaaaccgtcctgtgaagccctgggcatacgttgggttcccagtgttggtgttgatccatcccatccactcaagcccttgtccaggggcctgtcgcacccaattcatagcatagctagtgaaggtgtatccagaagccttgcaggaaaccttcactgaggccccaggcttcttcaactcagacccagattgcaccagctgcacctgggagtgggcaccgacactcttgaccttgctgagcgggctggcaaggc

SEQ ID NO: 2354 - DNA, 495 bp, Artificial Sequence
  source: /note="Description of Artificial Sequence: Synthetic polynucleotide"
gcctccctcgcgccatcaggacactctcaaggtcactggcaagctgagtctccctaagtggactcagagagggggtggtgaggactcacctgaggagacggtgaccagggttccctggccccaggggtcgaaccagtcgacgacactctcaaggtcatcaacagtaatacatggccatgtcctcagcctttaggctgctgatctgcaggtatgctgtgctggcagaggtgtccatggagaagacaaaccgtcctgtgaagccctgggcatatgttgggttcccagtgtaggtgttgaaccatcccatccactcaagcccttgtccaggggcctgtggcacccaattcataccataggtggtgaaactgtaaccagaagccttgcaggagaccttcactgaggccccaggctgcttcacctcatggccagactgcaccagctgcacctgggagtaggtaccgacactctcaaggtcactgagcgggctggcaaggc

SEQ ID NO: 2355 - DNA, 495 bp, Artificial Sequence
  source: /note="Description of Artificial Sequence: Synthetic polynucleotide"
gcctccctcgcgccatcaggacactctcactgtacctggcaagctgagtctccctaagtggactcagagagggggtggtgaggactcacctgaggagacggtgaccagggttccctggccccaggggtcgaaccagtcgacgacactctcactgtactcagggaatgtgcggccctgcccttggccatcacggagctcagctgcagggataactgggccttggatgtgtctctacagatggagagttggcccagaaaggctgggctgaagtgtgtgctgcccctggagctgaggtgccccagcgccttcccagagggctgctgggtccaggcccagaggtctgtgaggacctcaccagccctgggcatgactccagtagctgcatctgatgcaggacactcagggacaagaagcaaagagatgagtcacaagcggacaccacagcccacagcccccgttcgacactctcactgtacctgagcgggctggcaaggc

SEQ ID NO: 2356 - DNA, 495 bp, Artificial Sequence
  source: /note="Description of Artificial Sequence: Synthetic polynucleotide"
gcctccctcgcgccatcaggacactctgatgatccctggcaagctgagtctccctaagtggactcagagagggggtggtgaggactcacctgaggagacggtgaccagggttccctggccccaggggtcgaaccagtcgacgacactctgatgatcctcagtataaaaatccatggtggtttactcattgtgcgggtagctcagctgtaggaaaaactgttttctgaatgtggatctggaggtggtgactggactcttgagaagcgggttgcactgtgtgtttcctcgtgacctacacacctgacccacttcagcttcttccctgggggctggcagatacagctccaggaggaagtactggttatgattggaaatccagagacagcacaggtgaaggagagggtctctgagggctttactagaacatgagtgcactgaaaaacacaatttttttcatagggacactctgatgatccctgagcgggctggcaaggc

SEQ ID NO: 2357 - DNA, 495 bp, Artificial Sequence
  source: /note="Description of Artificial Sequence: Synthetic polynucleotide"
gcctccctcgcgccatcaggacactctcgccaatactggcaagctgagtctccctaagtggactcagagagggggtggtgaggactcacctgaggagacggtgaccagggttccctggccccaggggtcgaaccagtcgacgacactctcgccaatatcaataaaaatcatggttgtgtactccttgttaaggtagctcagctgtaggagaaactgttttttggatgtggatctggagatggtgactggactcttgaggagtgggttggattgtgcactccctcatgacctgtgcacctgattcgctccagtcccttccccggggggtgacggatccagctccagcaggaagcactggttgtaatggagaagcagagatgccacaggccagggggaggatctgtgagggcttcaccaggccaggagtgcaccgagaatcacagttgtcggcatgcacagggacactctcgccaatactgagcgggctggcaaggc

SEQ ID NO: 2358 - DNA, 495 bp, Artificial Sequence
  source: /note="Description of Artificial Sequence: Synthetic polynucleotide"
gcctccctcgcgccatcaggacactcttcaagcctctggcaagctgagtctccctaagtggactcagagagggggtggtgaggactcacctgaggagacggtgaccagggttccctggccccaggggtcgaaccagtcgacgacactcttcaagccttcacagtaatactcagccgtgtcctaggtggtcatggagctgagcttcacagagaactggctcttggttgagtcactgttgatggggacatggacctgggtggagggtgcatgatgtgtattccttgatgatccagtctagtaactgtgccccagccattccagcctgttgcccacgggatggtggattcatctcaaataatatccatggtaaaaaaaagaatccagacacagcacaggcagagggcagtgtctgagggcctcatgggtcctggacctgactcctgcagctgcacctgggacagacactcttcaagcctctgagcgggctggcaaggc

SEQ ID NO: 2359 - DNA, 495 bp, Artificial Sequence
  source: /note="Description of Artificial Sequence: Synthetic polynucleotide"
gcctccctcgcgccatcaggacactctacgtgtgtctggcaagctgagtctccctaagtggactcagagagggggtggtgaggactcacctgaggagacggtgaccagggttccctggccccaggggtcgaaccagtcgacgacactctacgtgtgttcacttaaaaatgcgtagttgtgtgttcactgggcacagagctcagctgtaagaactgtttcttggatctggatatggactcttgagcagtgggttgtaatttgtgctcccttcacaacccatgcacctgatccactcctgtccatcttctaggggcaagcagatacaattctagcaggaaacactggttatgatggggaatccagagacagtgcaggtgaggagagggtctgcaaggagtctcaagccagaagtgtgctgagaaacatagttgttgatgttaacaggttctgggcaacacaggacactctacgtgtgtctgagcgggctggcaaggc

SEQ ID NO: 2360 - DNA, 495 bp, Artificial Sequence
  source: /note="Description of Artificial Sequence: Synthetic polynucleotide"
gcctccctcgcgccatcaggacactcttccgtctactggcaagctgagtctccctaagtggactcagagagggggtggtgaggactcacctgaggagacggtgaccagggttccctggccccaggggtcgaaccagtcgacgacactcttccgtctatcagctctaaaatacatggctatgtgtttgttcctcacatagttcagctgtaagaagaactactttttggacatggatctggagatggtgactggactcttgagaagaggggagtaatttgtgctccctccatgacctatgcacccgatccactccagtacctcccatgggggcgctgatggatgcagctccagcaggaaacactggttgtgatggagaatgcagagatggcacaggtgagggagaggttctgtgaaggcttcaccaggccaagagtgcaccgagaaatacagttgttggcaggacactcttccgtctactgagcgggctggcaaggc

SEQ ID NO: 2361 - DNA, 495 bp, Artificial Sequence
  source: /note="Description of Artificial Sequence: Synthetic polynucleotide"
gcctccctcgcgccatcaggacactctaagagctgctggcaagctgagtctccctaagtggactcagagagggggtggtgaggactcacctgaggagacggtgaccagggttccctggccccaggggtcgaaccagtcgacgacactctaagagctgtcattcaaaatgtgtagttgtgtgttcactgggcacagagctcagctgtaagaactgtttcttggatctggatatggactcttgagaagtgggatgtaatttttgctccctttacaacccatgaacctgatccactcctgtccatcttctaggggcaagcagatacaattctagcaggacacactggttatgatggggaatccagagacagtgcaggtgagggagagggtctgtgaggatgtctcaagccagaagtgcactggaaaacacagttgttgatgttaacagtttctggacaacacggacactctaagagctgctgagcgggctggcaaggc

SEQ ID NO: 2362 - DNA, 495 bp, Artificial Sequence
  source: /note="Description of Artificial Sequence: Synthetic polynucleotide"
gcctccctcgcgccatcaggacactcttatcgctcctggcaagctgagtctccctaagtggactcagagagggggtggtgaggactcacctgaggagacggtgaccagggttccctggccccaggggtcgaaccagtcgacgacactcttatcgctctcagctctaaaatacatggctatgtgtttgttgctcacatagttcacctgtaagaagaagtactttttggacatggatctggagatggtgactggactcttgagaagaggggagtaatctgtgctccctccatgacctatgcacccgatccactccagtacctcccatgggggcgctgatggatgcagctccagaaggaaacactggttgtgatggagaatgcagagatggcacaggtgagggagaggttctgtgaaggcttcaccaggccaagagtgcaccgagaaatacagttgttggcaggacactcttatcgctcctgagcgggctggcaaggc

SEQ ID NO: 2363 - DNA, 495 bp, Artificial Sequence
  source: /note="Description of Artificial Sequence: Synthetic polynucleotide"
gcctccctcgcgccatcaggacactcttcagatgcctggcaagctgagtctccctaagtggactcagagagggggtggtgaggactcacctgaggagacggtgaccagggttccctggccccaggggtcgaaccagtcgacgacactcttcagatgctcatgaaagaagaattcatgtgcagacacatctgcttgtctgaagatatagtgcatgtgggaacatgtgggcttgtctgaattcatgataagtgggctggaattcatcctccactcatcacgtatgcacctgacccactcctgtgctttccatccagtgcctacaggaagcactgattgtgacagagaatccagaggcagcacaggtgagtgagggggtttgcaagggcttcaccaggctgataattgactgagaaaaacagttgttagcatgcacaagttctggatgatacattggaaacccgacactcttcagatgcctgagcgggctggcaaggc

SEQ ID NO: 2364 - DNA, 495 bp, Artificial Sequence
  source: /note="Description of Artificial Sequence: Synthetic polynucleotide"
gcctccctcgcgccatcaggacactctgtgtagcactggcaagctgagtctccctaagtggactcagagagggggtggtgaggactcacctgaggagacggtgaccagggttccctggccccaggggtcgaaccagtcgacgacactctgtgtagcatcaacagtaatacaaaccatgtcctcagatgtcacagagctcaggtatagtcaaaattgtttcttggatgaatctctggagaaggagagttggctctgcagagatggatcatcgtgtgtgtcacccttgcaatgtgttcctgacagcccatggaagcgggctagtggattcagctccagcagtaactgttggttgggatggacaacccagaaatggggcatgtgaggaagagaaaatgaaagtggatagcctgttaccgaaaactgctggactaagacacttgtaagcctgtcaatctcagtggacactctgtgtagcactgagcgggctggcaaggc

SEQ ID NO: 2365 - DNA, 495 bp, Artificial Sequence
  source: /note="Description of Artificial Sequence: Synthetic polynucleotide"
gcctccctcgcgccatcaggacactcttggcagttctggcaagctgagtctccctaagtggactcagagagggggtggtgaggactcacctgaggagacggtgaccagggttccctggccccaggggtcgaaccagtcgacgacactcttggcagtttcacagccaagatatggaaactaagtgtctgtcaatgggcaaatggataaagacaatgtggtatgtgtacacaacatagcattattatgccttataaaataaggaaatgctgccattttccacaagacaaatggactcccaccaccactagcaatggattttatccattgcagcccctccctgagagccggcagatccaggtccactagtaaggactggttgtgacggagtggccagtaacagtgtaggtgaggcagagggtaagtgtgtgctattcaggtccagggctgactcctgcagctggacactcttggcagttctgagcgggctggcaaggc

SEQ ID NO: 2366 - DNA, 495 bp, Artificial Sequence
  source: /note="Description of Artificial Sequence: Synthetic polynucleotide"
gcctccctcgcgccatcaggacactctcagtccaactggcaagctgagtctccctaagtggactcagagagggggtggtgaggactcacctgaggagacggtgaccagggttccctggccccaggggtcgaaccagtcgacgacactctcagtccaatcagtgtaaaaattcatggttgtgtactcgttgctcaggtagctcagctgtagaagaaactgtgttttggatgtggatctggagatggtgactggactcttgaggcgtgggttgcgttgtgttctccctcatgacctgtgcacctgattcactccagtcccttccctggggagctgagggatccagctccagcaggaagcactggttgtgatggagaagcagagacagcacagatgagggagagggtctgtgagggcttcgccaggccaagaacgcacgagaaatacagatgtcggcatgcacgacactctcagtccaactgagcgggctggcaaggc

SEQ ID NO: 2367 - DNA, 495 bp, Artificial Sequence
  source: /note="Description of Artificial Sequence: Synthetic polynucleotide"
gcctccctcgcgccatcaggacactctgtgtctacctggcaagctgagtctccctaagtggactcagagagggggtggtgaggactcacctgaggagacggtgaccagggttccctggccccaggggtcgaaccagtcgacgacactctgtgtctactcaagtaatacaaggttgtggcattgttggtcacagaactcagctaaaagaaaatttggttcttggacgtggatctggagatggtgactgagctcatgaggagtgggttagaatttgtgctccctcgtgacctatgccctgatccactcccttgactgaggactggcggatccagctccagcaggaagcactagttgtgatggagaatccagagacagcacaggtgagggagggggtctgtgagggcctcaccaggccaataaatgaccatgaaacacagtggttggtgtgcatggcttctgggacactctgtgtctacctgagcgggctggcaaggc

SEQ ID NO: 2368 - DNA, 495 bp, Artificial Sequence
  source: /note="Description of Artificial Sequence: Synthetic polynucleotide"
gcctccctcgcgccatcaggacactctgtacagtgctggcaagctgagtctccctaagtggactcagagagggggtggtgaggactcacctgaggagacggtgaccagggttccctggccccaggggtcgaaccagtcgacgacactctgtacagtgtcataaaaatacatggctgtgtgcttgtgactcacttagctcggctgtaggaagaactgctttttggacatggatctggagatggtgactggactcttgaggagtgggttggaatgtgcactccctcatgacctgtgcactggattcactccagtcccttcctggggggtttatgaatgcagctacagcaggaagcactggttgtgatggggaatccagagacagcacaggtgagggagagggtctgtgagggcttcaccaggccaagtgggcactgagaaacacagttgttggcatgcacaggacactctgtacagtgctgagcgggctggcaaggc

SEQ ID NO: 2369 - DNA, 495 bp, Artificial Sequence
  source: /note="Description of Artificial Sequence: Synthetic polynucleotide"
gcctccctcgcgccatcaggacactctggatcatcctggcaagctgagtctccctaagtggactcagagagggggtggtgaggactcacctgaggagacggtgaccagggttccctggccccaggggtcgaaccagtcgacgacactctggatcatctcatttaaaacatggctgtgagcttgttgctcacatagctccactgtaaaaacaagtgttttttggacccgaatttggagatggtgactggattcataaggagtgggtgggaatttttgctcccttcatgacgtgtgcgcctggtccactccagtccttcccatgtggactcgtggatccagctccagcaggaaacactggttgtgatggaaaatccagagacagcacaggtgagggagagggtctgcgagggctccaccaggccaagagtgcactaagaaacacagttgtttgtgagcacaggacactctggatcatcctgagcgggctggcaaggc

SEQ ID NO: 2370 - DNA, 495 bp, Artificial Sequence
  source: /note="Description of Artificial Sequence: Synthetic polynucleotide"
gcctccctcgcgccatcaggacactcttattggcgctggcaagctgagtctccctaagtggactcagagagggggtggtgaggactcacctgaggagacggtgaccagggttccctggccccaggggtcgaaccagtcgacgacactcttattggcgtcatgaaaaatatatggctatgtgattgttgctcatgtagctcagctgtaggaagaactgtttttggacatggatctggggatggtgactggactcttgaggaaaggggagtaatgtgtgctcccttcatcatctatggacccaatccactccattccctcccagagagggggtgatggatgcagatccaggaggaagcactggttgtgatggagaatgcagagatgacacacatgagggagagggtctttgggggcttcaccaggccaagagtgcaccgagaaacacagttgttggcaggcagacactcttattggcgctgagcgggctggcaaggc

SEQ ID NO: 2371 - DNA, 495 bp, Artificial Sequence
  source: /note="Description of Artificial Sequence: Synthetic polynucleotide"
gcctccctcgcgccatcaggacactctaggcttgactggcaagctgagtctccctaagtggactcagagagggggtggtgaggactcacctgaggagacggtgaccagggttccctggccccaggggtcgaaccagtcgacgacactctaggcttgatcaattaaaattcatggttgtgtacttgttgctcaggtagctcagctacaggaaacactgttttttggatgtggatctggagatagtgactggactcttgaggagtgggttggaatgtgcactccctcatgacctgtgcacctgattcgctccagtcccttccttgcggggggtgatggatgcagctccagcaggaagcactggttgtgatggagaatgcagagacagcacaggtgagagagagggtctgtgagagcttcactagcccaagagtgcaggagaaacacagttgttggcatgcacgacactctaggcttgactgagcgggctggcaaggc

SEQ ID NO: 2372 - DNA, 495 bp, Artificial Sequence
  source: /note="Description of Artificial Sequence: Synthetic polynucleotide"
gcctccctcgcgccatcaggacactctacacacgtctggcaagctgagtctccctaagtggactcagagagggggtggtgaggactcacctgaggagacggtgaccagggttccctggccccaggggtcgaaccagtcgacgacactctacacacgttcagcttaaaaatacatggctatgtgcttgttgctcatgtagctcagctgtaggaagaactgcttttttggacacggatctggggatggtgactggacacttgaggagtgggtggtaatgtgtgctcccttcatgacctatgcacccaatccactccattcccttccctggggggctgatggatccagcttcagcaggaagacctcgttatcacggggaacacagacacagcgcaggtaagggagagggtctgtgagggcttcaccaggccaagagtgcgctgagaaacacagttgttggcatgacactctacacacgtctgagcgggctggcaaggc

SEQ ID NO: 2373 - DNA, 495 bp, Artificial Sequence
  source: /note="Description of Artificial Sequence: Synthetic polynucleotide"
gcctccctcgcgccatcaggacactcttagacggactggcaagctgagtctccctaagtggactcagagagggggtggtgaggactcacctgaggagacggtgaccagggttccctggccccaggggtcgaaccagtcgacgacactcttagacggatcaagtaatacatgaccttgtccttggctttcagattggtcattgtaaggcagactgcacttaaaagggtgttgcttgagattgttaatttatttgtactcatggaaagtaaccctgagaattcatacttgatcactcactgttggcacccacacctatccctgttgtgaagcgtgctggaccaagctcatgctgtaaccagtaaaggtgaaaccagaggctttgcaggagagtctcaccactgggctgtaaattttttccccctctgactccatcagtaaacttcacacaggacttccgtgagacactcttagacggactgagcgggctggcaaggc

SEQ ID NO: 2374 - DNA, 495 bp, Artificial Sequence
  source: /note="Description of Artificial Sequence: Synthetic polynucleotide"
gcctccctcgcgccatcaggacactctgagcgatactggcaagctgagtctccctaagtggactcagagagggggtggtgaggactcacctgaggagacggtgaccagggttccctggccccaggggtcgaaccagtcgacgacactctgagcgatatcaagtaatacactgcctactcctcagctttccagtagataattttaagggagattgtgatgttaagtgttgtccccaggaactgtgaatcttctttgtgctggagcagagcaccactgagaacttccacttgggtcactcatggctaccacccactccagcccctctcctccagccatcagggcccaataaatgctgcagtcagtgaaggtgaatcttgatgctttgcagaagaagctaagagaatagccaggctattttgccaaagacaaaaatatagatccagtaaacctttgtggttttgacactctgagcgatactgagcgggctggcaaggc

SEQ ID NO: 2375 - DNA, 495 bp, Artificial Sequence
  source: /note="Description of Artificial Sequence: Synthetic polynucleotide"
gcctccctcgcgccatcaggacactctgcatctgactggcaagctgagtctccctaagtggactcagagagggggtggtgaggactcacctgaggagacggtgaccagggttccctggccccaggggtcgaaccagtcgacgacactctgcatctgatcaagtaatacacggacttttcctgagctctcaggttaatcatcttaaaagagaatctcctgaactgagtgtatttgaggattgttaatcatctttttactcaaggagagtcccactgagaacttctatttgaattattgttattacccacacccacccctgtcatgaagcctgctggatcaagcttatgctgttttcagtgaaagtgaatccagaggctttgcagaaaaggcagaattcctggtctgtagtatttctctgtctaactccattagttaacttcacaggggacttctgaaaacagacactctgcatctgactgagcgggctggcaaggc

SEQ ID NO: 2376 - DNA, 495 bp, Artificial Sequence
  source: /note="Description of Artificial Sequence: Synthetic polynucleotide"
gcctccctcgcgccatcaggacactcttgctacacctggcaagctgagtctccctaagtggactcagagagggggtggtgaggactcacctgaggagacggtgaccagggttccctggccccaggggtcgaaccagtcgacgacactcttgctacactcaagtattacaaggccttgtccttgactttcagtttggtccctttaaggtagactgcacatgaaaaggtgtcgcttgggactgttaatttatttgtactcatggagagtaactctgagaactcccacttgatcactcactgtttccacccacaccaatccctgtcatgaagcctgctggaccaagctcatgctgtagccagtaaaggtgaaatcagaggctttgcatgagagtctcagtgaaccactgggctgtacaattttcccccctgactctatcagtaaatttcacacaggacttctggacactcttgctacacctgagcgggctggcaaggc

SEQ ID NO: 2377 - DNA, 495 bp, Artificial Sequence
  source: /note="Description of Artificial Sequence: Synthetic polynucleotide"
gcctccctcgcgccatcaggacactctaactgccactggcaagctgagtctccctaagtggactcagagagggggtggtgaggactcacctgaggagacggtgaccagggttccctggccccaggggtcgaaccagtcgacgacactctaactgccatcactgtaatatacggccttgcccttggctttcaggttggtccttgtaaggtagactgcacttgaaagggtgtcacttgggaatgttgatttatctgtactcatggagagtaacccttagaactcccatatgatctctcactgttgctacccacaccaattcctgttgtgaagcgtgctggaccaagctcatgctgcacccagtaaacccgaaaccagaggctttgcaggacagtctcagtgaactgctgggctgttaaatttttctccttctgactccatcagtaaacatcacacaggacttgacactctaactgccactgagcgggctggcaaggc

SEQ ID NO: 2378 - DNA, 495 bp, Artificial Sequence
  source: /note="Description of Artificial Sequence: Synthetic polynucleotide"
gcctccctcgcgccatcaggacactctttggactgctggcaagctgagtctccctaagtggactcagagagggggtggtgaggactcacctgaggagacggtgaccagggttccctggccccaggggtcgaaccagtcgacgacactctttggactgtcaagtaatacacagacttgtcttgggctctcagttttattatcttaaaagagaatcttctgaacagtgtctctgaggactgttaatcttctttgtactgaaggcgagtcccattgagaacttccacttgaattactgttatctccctcaccaacacttgccatgaatcctgctggaccaaacttgttcttttttcagtgaatccaggggctttgcagaacagtctgagaattcttggtctgtagtattttcctgtctgactccactagttaacttcacagaggacttctgcacacacagagggacactctttggactgctgagcgggctggcaaggc

SEQ ID NO: 2379 - DNA, 495 bp, Artificial Sequence
  source: /note="Description of Artificial Sequence: Synthetic polynucleotide"
gcctccctcgcgccatcaggacactcttcggtactctggcaagctgagtctccctaagtggactcagagagggggtggtgaggactcacctgaggagacggtgaccagggttccctggccccaggggtcgaaccagtcgacgacactcttcggtacttcacagtaataaacggaattttcctgagctctcaggttaatcatcttaagagagaatcatctgaaaagcgtgtctctgaggactgttaatcttctttgtactcaaggagagtcccactgagaacttccacttgaattactgatgttatcacctacacccacccctgtcatgaagcctgctggaccaagcttatgctgttttcagtgaaagtgaatccacagggtttccagaaaagtctgagaattcttggtctgtagtatttctctgagagactccagtaattaacttcacaggggacctctggacactcttcggtactctgagcgggctggcaaggc

SEQ ID NO: 2380 - DNA, 495 bp, Artificial Sequence
  source: /note="Description of Artificial Sequence: Synthetic polynucleotide"
gcctccctcgcgccatcaggacactctccatggatctggcaagctgagtctccctaagtggactcagagagggggtggtgaggactcacctgaggagacggtgaccagggttccctggccccaggggtcgaaccagtcgacgacactctccatggattcacacagttaaatgctgccatgttctgggttctcaggctgttcatttgcatgtacagcatgtacttggtgttgtctctggaagtggtgagtctgcccctaacatagtctgcattgtattgatgactttcactacgccatataactgcaacccattccagccccttccctgaggcctggcaaacccagtgaatctcatagatactgaaggtgaaccaagaggctgcacaggagagcctcaggggcccctctcagtgtaccaagtctcccccagactctgtaagctgggcctcaccctggatacgacactctccatggatctgagcgggctggcaaggc

SEQ ID NO: 2381 - DNA, 495 bp, Artificial Sequence
  source: /note="Description of Artificial Sequence: Synthetic polynucleotide"
gcctccctcgcgccatcaggacactctacgaagatctggcaagctgagtctccctaagtggactcagagagggggtggtgaggactcacctgaggagacggtgaccagggttccctggccccaggggtcgaaccagtcgacgacactctacgaagattcacagtaatacactgcctacccctgtgagagccccctcagcttccaagtagattattttaagggagactgtgctggtaattggtgtccctgggaattgtgaatcttcattatgctgatgcagaatatcactgagaacttccacttgaatcaatcactgttaccacccactccagcctctgtcccccagccatctgggctcaatttatgctgtagtcagtgaaggtgaatcttgatgctttgcaaaagaggctaagagaacagccaggctgttttgccaaagataaaaatatagatccagtaagacactctacgaagatctgagcgggctggcaaggc

SEQ ID NO: 2382 - DNA, 495 bp, Artificial Sequence
  source: /note="Description of Artificial Sequence: Synthetic polynucleotide"
gcctccctcgcgccatcaggacactctactgtggactggcaagctgagtctccctaagtggactcagagagggggtggtgaggactcacctgaggagacggtgaccagggttccctggccccaggggtcgaaccagtcgacgacactctactgtggatcaacagtattacacaaccttgtccttggctttcaggttagtcattgtaaggtagagtgcacgtgaaagggtgtcgctggaccagttaatttatttgtactcatgaagagtaaacctgagcactcccacttgttgactcactgttgccagccaccacaatccctgttgtgaagcctgctggaccaacctcaggctgttgccagaaaaggtgaatccagacgctttgcaagaaagtctcagtgaaccactgggctgtactacgtttacccctctgactccaccactgaacttcatacaggacttgacactctactgtggactgagcgggctggcaaggc

SEQ ID NO: 2383 - DNA, 495 bp, Artificial Sequence
  source: /note="Description of Artificial Sequence: Synthetic polynucleotide"
gcctccctcgcgccatcaggacactctggtgtcatctggcaagctgagtctccctaagtggactcagagagggggtggtgaggactcacctgaggagacggtgaccagggttccctggccccaggggtcgaaccagtcgacgacactctggtgtcattcaagtaatacatggccttctcctcggctctcaggttggtcattttgagggagactgtgctgacaagggtgtccctgaggattatgatttttctttgtattgatggagggtaccactaacaaattccacttgaatccctcgcttttgcctcccacaccaacccctgtcctgaagcctgctgggctgagctcatgctagagtcaatgaaggtaaattcagaggctttgtaaaaaaggctctgagaacagttaggctgtatcatttctcttccagattccaccagtgaacttcttgtaggactctgacactctggtgtcatctgagcgggctggcaaggc

SEQ ID NO: 2384 - DNA, 495 bp, Artificial Sequence
  source: /note="Description of Artificial Sequence: Synthetic polynucleotide"
gcctccctcgcgccatcaggacactcttcgtgaagctggcaagctgagtctccctaagtggactcagagagggggtggtgaggactcacctgaggagacggtgaccagggttccctggccccaggggtcgaaccagtcgacgacactcttcgtgaagtcacagtaatacaaggtcttgtccttggctttcacattggtcattttaaggtagactgcacttgaaagggtgttgcttgggactgttaatttacttgtactcatggagagtaaccctgataactcactgttgccacccacacaaatccctgtcatgaagcctgctggaccaagctcatgctgtagccagtacaagtgaaatcagaggctttgcaggagagtctgtgagaaccgctgggctgtacaatgtttccccctctgactccatcagtaagcttcaacaggacttacatgaacacagagggacactcttcgtgaagctgagcgggctggcaaggc

SEQ ID NO: 2385 - DNA, 495 bp, Artificial Sequence
  source: /note="Description of Artificial Sequence: Synthetic polynucleotide"
gcctccctcgcgccatcaggacactctcactagctctggcaagctgagtctccctaagtggactcagagagggggtggtgaggactcacctgaggagacggtgaccagggttccctggccccaggggtcgaaccagtcgacgacactctcactagcttcacacagtaatacacgcctgcatccccagccatcacacttctcagctgtaagttttcttgttttttactatgtgtttctggagatgctagctctgccctgaaggttggggcttagtgtttcccttaacccatatcacaccaacacactgaagaccttttgatgggagatggtggatccaggaaacagaatgttcagaaattgaatgtgcataggcggcataggtgaggctgagcatgaccaaggggaccactacttcttcctcccattgcacaaggtggtcctcactgtgaacccctgagaagacactctcactagctctgagcgggctggcaaggc

SEQ ID NO: 2386 - DNA, 495 bp, Artificial Sequence
  source: /note="Description of Artificial Sequence: Synthetic polynucleotide"
gcctccctcgcgccatcaggacactctggtcaactctggcaagctgagtctccctaagtggactcagagagggggtggtgaggactcacctgaggagacggtgaccagggttccctggccccaggggtcgaaccagtcgacgacactctggtcaacttcagcacagtagtacacatctatgtcctcagatctctgactgctcagctccatgtaggctgtgctcgtggacgtgtccctggtcatggtgactctgccctgaaacttctgtgcatagcctgtgttaccattgccagagtagctccctaccatccattcaaacccttatccaggggcctgtcacacacagtgaatgtcgtagctggcgaaggtgtatccagagctttgcaggagaccttcactgaggccatggacgctggcaacaggagagtcatcagaagctgggtgagtcatataatcaggagacactctggtcaactctgagcgggctggcaaggc

SEQ ID NO: 2387 - DNA, 495 bp, Artificial Sequence
  source: /note="Description of Artificial Sequence: Synthetic polynucleotide"
gcctccctcgcgccatcaggacactcttacgtacgctggcaagctgagtctccctaagtggactcagagagggggtggtgaggactcacctgaggagacggtgaccagggttccctggccccaggggtcgaaccagtcgacgacactcttacgtacgtcaacaggaatacacgaccatgtcttcagatctcaggctgctcagctccatgtaggctgtgctcacggacctgtcactggtaatggtgactctgccccggaacttctgtgcgtagtgtgtgttatcattgtaagggttgatgcatcccaaccactatgcccttgtccagggccctgtcgcacccactgtgtaaagtatttggtgaaggtgtatctggaagcctggccaggagaccttcactgaggacgcaggcttcttcacctcagccccaggctgcaacagctgaacctgggaatggacatcgacactcttacgtacgctgagcgggctggcaaggc

SEQ ID NO: 2388 - DNA, 495 bp, Artificial Sequence
  source: /note="Description of Artificial Sequence: Synthetic polynucleotide"
gcctccctcgcgccatcaggacactctatgacaccctggcaagctgagtctccctaagtggactcagagagggggtggtgaggactcacctgaggagacggtgaccagggttccctggccccaggggtcgaaccagtcgacgacactctatgacacctcacacagtaatacatggccgtgtcttcagatctcaggctgctcagctccatgtaggctgtgctcgtggatgtgtccctggtcatggtgactctgccctggaacttctctgcgtagcttatgctgccatcactagggcacatccttcccatccactcaagcccttgtgcatgggcctggcgcacctagtgcatagagtaactggtgaaggtaggtgtatccacaagtcttgcaggagactttcactgatgccccagccttcttcatctcatccccagactgcaccagctgcacctgggactgggacactctatgacaccctgagcgggctggcaaggc

SEQ ID NO: 2389 - DNA, 495 bp, Artificial Sequence
  source: /note="Description of Artificial Sequence: Synthetic polynucleotide"
gcctccctcgcgccatcaggacactctcttcacgactggcaagctgagtctccctaagtggactcagagagggggtggtgaggactcacctgaggagacggtgaccagggttccctggccccaggggtcgaaccagtcgacgacactctcttcacgatcacccagtaatacacagccgagtcctcagatctcaggctgctcagctctatgtaggctgtcctcagggacatgtccctggtaatggtgactctgccctggaacttctttgcatagttggtgttaccattgtaaagtgtgatccatctcatcctttcaagcccttgtccaggggcctgttgcaaccagtgcaaggagcagcaagtgaaggtgtatccggaagccttgcaggagaccttcactgaggccccaggcttctttacctcagcctcagactgccccagctgcacctgggagcagacacgacactctcttcacgactgagcgggctggcaaggc

SEQ ID NO: 2390 - DNA, 495 bp, Artificial Sequence
  source: /note="Description of Artificial Sequence: Synthetic polynucleotide"
gcctccctcgcgccatcaggacactctagaatcagctggcaagctgagtctccctaagtggactcagagagggggtggtgaggactcacctgaggagacggtgaccagggttccctggccccaggggtcgaaccagtcgacgacactctagaatcagtcacacagtaatacacgaccatgtcttcagatctcaggctgctcagctccatgtaggctgtgctcatggacctgtcactggtaatggtgactctgccccagaacgtctgtgcatagtgtgtgttatcattgtaagggttgattcatcccatccactatgcccttgtccagggctttgtcacacccaccgtgtaaagtatttggtgaaggtgtatctggaagcctggcaggagaccttcactgaggacccaggcttcttcacctcagccccaggctgcaacagctgaacctgggaatggacaccgacactctagaatcagctgagcgggctggcaaggc

SEQ ID NO: 2391 - DNA, 495 bp, Artificial Sequence
  source: /note="Description of Artificial Sequence: Synthetic polynucleotide"
gcctccctcgcgccatcaggacactctagttatgcctggcaagctgagtctccctaagtggactcagagagggggtggtgaggactcacctgaggagacggtgaccagggttccctggccccaggggtcgaaccagtcgacgacactctagttatgctcatgcacagtaatgtgtggctgtgtccacaatgtccatgttgatcactgttagaaccacttcattcttggaggtgtccttggagataatgagcctactcttcagagatgggctgtagtatttattatcattctaataaatgtgtgcaagccactccagggcctttgctgagggctgacagatctaacccacacccattccagaagtgctgagtgagaacccagagaaggtgcaggtcagcatgagggtctgtgtgggtttcaccagtgcaggaccagactccttcaaggtgacctgggataagacactctagttatgcctgagcgggctggcaaggc

SEQ ID NO: 2392 - DNA, 495 bp, Artificial Sequence
  source: /note="Description of Artificial Sequence: Synthetic polynucleotide"
gcctccctcgcgccatcaggacactctaggtctcactggcaagctgagtctccctaagtggactcagagagggggtggtgaggactcacctgaggagacggtgaccagggttccctggccccaggggtcgaaccagtcgacgacactctaggtctcatcacagagtcatatgcagctgcatcctctgccctcagtctgttcatttgcagatacagtgagtttttggtattgtctctggaaatggtgaatcggcccttcacagagtctgcgtagtacatggtactaccactaccactaataactgggacccactgcagacccttccctggagcctgggggacccagtgcgtgctatggctactgaaggtgaatccagaggctgcacaggagagtctcagggacacccaggctttgtcaagtttgctccagactctaccagctgcatctcacactggacaccgacactctaggtctcactgagcgggctggcaaggc

SEQ ID NO: 2393 - DNA, 495 bp, Artificial Sequence
  source: /note="Description of Artificial Sequence: Synthetic polynucleotide"
gcctccctcgcgccatcaggacactctgtcatagtctggcaagctgagtctccctaagtggactcagagagggggtggtgaggactcacctgaggagacggtgaccagggttccctggccccaggggtcgaaccagtcgacgacactctgtcatagttcacacagtaatacacagccatgtcctcgggcctcaggctgttcatttgctgatacaggaagttcctggaattgtctctggagatgatgaatcggcccttcacagagtctgcatagtgcgtcctactgccattccaactaacacccgatacccactccagcccctttcctggagcctggcggacccagttcatgtcactgttactgaaggtgaatccagaggctgcacaggagagtctcagggaccccccaggctctaccaagcctcccccagactccaccagctgcactgttgtacccaggtgacactctgtcatagtctgagcgggctggcaaggc

SEQ ID NO: 2394 - DNA, 495 bp, Artificial Sequence
  source: /note="Description of Artificial Sequence: Synthetic polynucleotide"
gcctccctcgcgccatcaggacactctgtgacttgctggcaagctgagtctccctaagtggactcagagagggggtggtgaggactcacctgaggagacggtgaccagggttccctggccccaggggtcgaaccagtcgacgacactctgtgacttgtcaacagtaatacacggccgtgtcctcggttttcaggctcttcatttgcagataggtgatgcttttggaatcatctcttgagattgtgaatctgcctttcacagacgtggtctattctgttgtcccaccattagctttgtttctaatgaaacctacccattccagccccttcccgggagcctggcggaccccgctcatgtagtagtaactgaaggtgaatccagaggctgcacaggagagtctcagggaccccccaggctgtaccaagcctcccccagactccaccagctgcacctcacactggacactctgtgacttgctgagcgggctggcaaggc

SEQ ID NO: 2395 - DNA, 495 bp, Artificial Sequence
  source: /note="Description of Artificial Sequence: Synthetic polynucleotide"
gcctccctcgcgccatcaggacactctgattgcagctggcaagctgagtctccctaagtggactcagagagggggtggtgaggactcacctgaggagacggtgaccagggttccctggccccaggggtcgaaccagtcgacgacactctgattgcagtcaacactaatagagggccgtgtcctcggttttcaggctgttcatttgcagatgaagtgtgttcttggcgttatctctggaggtattgaatcggtccttaccggagtctatgaggtatgtgctacccccattaggattaacttgtcaaaccaactccagcccattccctggagcctggcggacacagttcatgtagtagctactgaaggtgaattgagaggctgcacaggagagtctcggggaccacgcaggctttgccaagcctcccccagactccaccagctgcatctcacactggataccgacactctgattgcagctgagcgggctggcaaggc

SEQ ID NO: 2396 - DNA, 495 bp, Artificial Sequence
  source: /note="Description of Artificial Sequence: Synthetic polynucleotide"
gcctccctcgcgccatcaggacactctactatgacctggcaagctgagtctccctaagtggactcagagagggggtggtgaggactcacctgaggagacggtgaccagggttccctggccccaggggtcgaaccagtcgacgacactctactatgactcatgtacagccatacacagccatgtcctcagttctctgactgttcatttgcagatacagagagttcttagcattgtctttggagatggagaatctgcccttcacagagtctgcatggtgtatctgacttccatcatcttttatatctattactcactccagccccttgcctgcagactggtgaactgggctcattcagaagctactgaaggcgaatctagaggctacacaggagagtctcaggaacttcccaggttgtctcaggtcctctgtgggctctatcagctccacctcacactgaacgacactctactatgacctgagcgggctggcaaggc

SEQ ID NO: 2397 - DNA, 495 bp, Artificial Sequence
  source: /note="Description of Artificial Sequence: Synthetic polynucleotide"
gcctccctcgcgccatcaggacactctatggtcaactggcaagctgagtctccctaagtggactcagagagggggtggtgaggactcacctgaggagacggtgaccagggttccctggccccaggggtcgaaccagtcgacgacactctatggtcaatcacatacagtaacacacagctgtgcccgctgctctcagactgttcattagcaaatacagtgagttcttggcattttctttggagatggtgaatttgctcttcaaagattatgcataacatatctgacttccatcacactgtatatctactactcactccagccccttccctggagcctgggaaaccgagttccttcagtagctactgaaggttaatccagagtctgcacaggagagtctcagggatcccccaggttgtcttgggtcctctccggactccacgagctgtacctctcactagacgacactctatggtcaactgagcgggctggcaaggc

SEQ ID NO: 2398 - DNA, 495 bp, Artificial Sequence
  source: /note="Description of Artificial Sequence: Synthetic polynucleotide"
gcctccctcgcgccatcaggacactctgatggcttctggcaagctgagtctccctaagtggactcagagagggggtggtgaggactcacctgaggagacggtgaccagggttccctggccccaggggtcgaaccagtcgacgacactctgatggctttcatgtatagccatacacggccacgtcctcagctctctgagtgttcatttgcagatacagagagttcttagcattgtctttggagatggagaatctgcccttcacagagtctgcatggtgtatctgacttccatcatcttttatatctattactcactccagccccttgcctggagactggtgaactcggctcattcagaagctactgaaggcgaatctagaggctacacaggagagtctcaggaacttcccaggttgtctcaggtcctctatggactctatcagctccacctcacactgaacgacactctgatggcttctgagcgggctggcaaggc

SEQ ID NO: 2399 - DNA, 495 bp, Artificial Sequence
  source: /note="Description of Artificial Sequence: Synthetic polynucleotide"
gcctccctcgcgccatcaggacactctagcatatgctggcaagctgagtctccctaagtggactcagagagggggtggtgaggactcacctgaggagacggtgaccagggttccctggccccaggggtcgaaccagtcgacgacactctagcatatgtcacatacagtaacacacagctgtgccctctgctctcagactgttcatttgcaaatacagtgagttcttggcattttctttggagatggtgaatttgctcttcacagattgggcataacatatctgacttccatcacactgtatatctactactcactccagccccttccctggagcctgggaaaccgagctcattcagtagctactgaaggttaatccagagtctgcacaggagagtctcaaggatcccccaggttgtcttgggtcctctccggactccacgagctgtacctctcactagacgacactctagcatatgctgagcgggctggcaaggc

SEQ ID NO: 2400 - DNA, 495 bp, Artificial Sequence
  source: /note="Description of Artificial Sequence: Synthetic polynucleotide"
gcctccctcgcgccatcaggacactctcatatgctctggcaagctgagtctccctaagtggactcagagagggggtggtgaggactcacctgaggagacggtgaccagggttccctggccccaggggtcgaaccagtcgacgacactctcatatgcttcaagtaatacacagacctatcctcggctctgacgctgttcatttgcagatacagtgatttcttggcatcatctctggagagggtgaatcgacccttcacagagtctgcatagcttgtgctacctacacaacaactcataaatgagacctactccagccctttcccaggagcctgatggacccagctcatccagtacctaataaaggtactaaaggtgaatccagaggctgcaaaagaaagtctcagggacccccaggctataacaagcctcccaaagactccaccagctgcacctcacactggacactctcatatgctctgagcgggctggcaaggc

SEQ ID NO: 2401 - DNA, 495 bp, Artificial Sequence
  source: /note="Description of Artificial Sequence: Synthetic polynucleotide"
gcctccctcgcgccatcaggacactcttcgtcgatctggcaagctgagtctccctaagtggactcagagagggggtggtgaggactcacctgaggagacggtgaccagggttccctggccccaggggtcgaaccagtcgacgacactcttcgtcgattcaacacagccgagtcctcatctctcagactgttcatttgcaagtacagcatgttcttgccattgtctctagagatggtgaatctacccttcagtgtctgcatagtataggctaccaccactagcactaatgtatgagacccattccagcccctttcttgaagcccggtgggcccagttcatgtcattgcttctcaagatgaatccgcaggctgcacatgagagtctcaggacacccccaaccccaccacagctgtaccaagtctcccccagactctaccagctgcacctcatactgcacaccgacactcttcgtcgatctgagcgggctggcaaggc

SEQ ID NO: 2402 - DNA, 495 bp, Artificial Sequence
  source: /note="Description of Artificial Sequence: Synthetic polynucleotide"
gcctccctcgcgccatcaggacactctcagtctgtctggcaagctgagtctccctaagtggactcagagagggggtggtgaggactcacctgaggagacggtgaccagggttccctggccccaggggtcgaaccagtcgacgacactctcagtctgttcaagtaatacatggccgtgtccttagctttcagactgtccatttgcagatagagcatgctcttagaattgtctcggagattgtgaatcggcccttcacagagtctgcatagtatttctgacttccatcattccagatatgtgccactcactccagccccttccctggagcctggcggacccagctcatgccatagctactaaaggagaatcctgaggctgcacaggagagtctcagggaccccccaggctggaccaagcctcccccagactccaccagctgcacctcacactggacacctgcgacactctcagtctgtctgagcgggctggcaaggc

SEQ ID NO: 2403 - DNA, 495 bp, Artificial Sequence
  source: /note="Description of Artificial Sequence: Synthetic polynucleotide"
gcctccctcgcgccatcaggacactctaacgcgtactggcaagctgagtctccctaagtggactcagagagggggtggtgaggactcacctgaggagacggtgaccagggttccctggccccaggggtcgaaccagtcgacgacactctaacgcgtatcagtacagtaatagatggccgtgtactcggttttcagggtattcacttgcagatacagtgtgttctttgaatcatctcttgagatggtgaacctgcctttcacagatgcagcgcattctgtcgtgtaactgttacgtttggttctaatacggccaacccactccagccctttcccagaagcctggcggatccagtgcattcagaagtcactgaaggtgaatctagaagctgcaaatgagagtctcggggacccacccaggctgtaccaagcctcccccagactccaccagctgcgcctcacggacactctaacgcgtactgagcgggctggcaaggc

SEQ ID NO: 2404 - DNA, 495 bp, Artificial Sequence
  source: /note="Description of Artificial Sequence: Synthetic polynucleotide"
gcctccctcgcgccatcaggacactctgtagttcgctggcaagctgagtctccctaagtggactcagagagggggtggtgaggactcacctgaggagacggtgaccagggttccctggccccaggggtcgaaccagtcgacgacactctgtagttcgtcaacaataatacacagccatgtcctcagctatcaggctgttcatttgaagatacaaggacttcttggcgttgtctctggagatggtgaatcggcccatcacggagtctgcatagtatgtatcaccaccagtaccaatagctgatacccactccggacccttccctggagcccggcgaacccagtgcagaacatagctactgaaggcgaatccagaggctgcacaggagggtctcagggaccccccaggctgtaccaagcctcccccagactccaccagctgatcctcacactggacacctgcgacactctgtagttcgctgagcgggctggcaaggc

SEQ ID NO: 2405 - DNA, 495 bp, Artificial Sequence
  source: /note="Description of Artificial Sequence: Synthetic polynucleotide"
gcctccctcgcgccatcaggacactctcgaactacctggcaagctgagtctccctaagtggactcagagagggggtggtgaggactcacctgaggagacggtgaccagggttccctggccccaggggtcgaaccagtcgacgacactctcgaactactcatgactcaataatacagagccatattctcagctctcagactgttcatttgcagatacaacctgtgcttggcattgtctttggagatggtgaatctgaccttcacagagtctgcatattatgtctgacttccatcgtacattatatctactactcactgcagcccctttcctggagcctggcagattcagctgatctagtagctacagaaggtggattcagaggatgcacggcagagtctcaggcacattcagcttgtgccaactctccccaagactccaccatctgcaccccacactagacgacactctcgaactacctgagcgggctggcaaggc

SEQ ID NO: 2406 - DNA, 495 bp, Artificial Sequence
  source: /note="Description of Artificial Sequence: Synthetic polynucleotide"
gcctccctcgcgccatcaggacactctttaacgtcctggcaagctgagtctccctaagtggactcagagagggggtggtgaggactcacctgaggagacggtgaccagggttccctggccccaggggtcgaaccagtcgacgacactctttaacgtctcaacagtaatacacggtcatgtcctcagctctcaggctgttcacttgcagatagagggagttcttggcattgtctctggagatggtcaatcggcccttcacagagtctacatagtatttctcacttccgtcacactttatgtcggccacccactccagccccttctccggagcctggcagacccagtgcatccaggagctactgaaggtgaatccagaggctgcacaggagagtctcagggaccctccaggctgtaccaagcctcacccagactccaccagctgcacctcacactggacaccgacactctttaacgtcctgagcgggctggcaaggc

SEQ ID NO: 2407 - DNA, 495 bp, Artificial Sequence
  source: /note="Description of Artificial Sequence: Synthetic polynucleotide"
gcctccctcgcgccatcaggacactctagcaacctctggcaagctgagtctccctaagtggactcagagagggggtggtgaggactcacctgaggagacggtgaccagggttccctggccccaggggtcgaaccagtcgacgacactctagcaaccttcacatacagtaatacacggccgtgccctctgctctcagactgttcatttgcaaacagagtgagttcttggcattttctttggagatggtgaatctgctcttcacagattgtgcataacatagctgacttctatcctactatatatctactactcactccagccccttccctggagcctgggaatctgagctcattcagtagctactgaaggttaatccagagtctgcacaggagagtctcagggatcccccaagttgtctttggttttcttcagactccaccagctgtacctcacactggacgacactctagcaacctctgagcgggctggcaaggc

SEQ ID NO: 2408 - DNA, 495 bp, Artificial Sequence
  source: /note="Description of Artificial Sequence: Synthetic polynucleotide"
gcctccctcgcgccatcaggacactctttctcgagctggcaagctgagtctccctaagtggactcagagagggggtggtgaggactcacctgaggagacggtgaccagggttccctggccccaggggtcgaaccagtcgacgacactctttctcgagtcaacagtaatacacagccttgtccttggctttcaggttggtcattgtaaggtagactgcacatgaaaaggtgtcgcttgggactgttaatttatttgtactcatggagagtaactctgagaactcccacttgatcactcactgtttccacccacaccaatccctgtcatgaagcctgctggaccaagctcatgctgtagccagtaaaggtgaaatcagaggctttgcaggagagtctcagtgaaccactgggctgtacaattttctgcctctgactccatcaataaacttcacacaggacttgacactctttctcgagctgagcgggctggcaaggc

SEQ ID NO: 2409 - DNA, 495 bp, Artificial Sequence
  source: /note="Description of Artificial Sequence: Synthetic polynucleotide"
gcctccctcgcgccatcaggacactctactctacgctggcaagctgagtctccctaagtggactcagagagggggtggtgaggactcacctgaggagacggtgaccagggttccctggccccaggggtcgaaccagtcgacgacactctactctacgtcaacacagtaatacacagccatgtcgtcggctctcaggctgttcatttgcagatacagtgaattctgggcattgtctctagagatggtgaatcagcccttcacagagtctgtgtagagtacggtatcaccacttgtactaataactgagacccactccaaaccctttcctggagcctggtggacccagtgcatagcagagctactgaaggtgaatccagaggctgcacaggagagtctcagagaccctcccagtctttactaagcctcccccagactccaccagctgcacctcacactggacgacactctactctacgctgagcgggctggcaaggc

SEQ ID NO: 2410 - DNA, 495 bp, Artificial Sequence
  source: /note="Description of Artificial Sequence: Synthetic polynucleotide"
gcctccctcgcgccatcaggacactcttaccggaactggcaagctgagtctccctaagtggactcagagagggggtggtgaggactcacctgaggagacggtgaccagggttccctggccccaggggtcgaaccagtcgacgacactcttaccggaatcaacagtagtacacaactgtgccctcggctctcaggctgttcatttgcagagacagtgaattctgggcattgtctctggagatggtgaatcggcccttcacagagtctgtgtagagtacggtatcaccacttgtactaataactgagacccactacaaaccctttcttggagcctggcggacccagtgcatagcagagctactgaaggtgaatccagaggctgcacaggagagtctcagggaccccccaggctggaccaagccttccccagactccaccagctgcacctcacactggacaccgacactcttaccggaactgagcgggctggcaaggc

SEQ ID NO: 2411 - DNA, 495 bp, Artificial Sequence
  source: /note="Description of Artificial Sequence: Synthetic polynucleotide"
gcctccctcgcgccatcaggacactctcgaattgcctggcaagctgagtctccctaagtggactcagagagggggtggtgaggactcacctgaggagacggtgaccagggttccctggccccaggggtcgaaccagtcgacgacactctcgaattgctcatgtacagccatgcatggtcatgtcctcagctctcagactgttcgtttggagatacggtgagttcttagcattgtctttggagatggtgaatctgcccttcacagagtctgcatggtatatctgacttccatcatattttacatctattactccctccagccccttccctagagtctcattgacccagctcattcagtagctactgaaggtgaatccagaggctacacaggagagtctcaggaacttcccaagttgtctcaggccctctatggactctatcagctccacctcacactgaacgacactctcgaattgcctgagcgggctggcaaggc

SEQ ID NO: 2412 - DNA, 495 bp, Artificial Sequence
  source: /note="Description of Artificial Sequence: Synthetic polynucleotide"
gcctccctcgcgccatcaggacactctttcgctcactggcaagctgagtctccctaagtggactcagagagggggtggtgaggactcacctgaggagacggtgaccagggttccctggccccaggggtcgaaccagtcgacgacactctttcgctcatcagtatagtaatacacggccgtgtcctcggttttcaggctgttcatttgcagataggcgatgcttttggaatcatcgcttgagatggtgaatctgcctttcacagacgcggcgtattctgttgttccacgattagttttgtttttagtgaaacctacccactccagcccctttcctggagcccggcagatccactgcatgcagtagttaacggaaggtgaatccagaggctgcacaggagagtctcagggaccccccaggctgtaccaagcctcccccagactccaccagctgcacctcacagacactctttcgctcactgagcgggctggcaaggc

SEQ ID NO: 2413 - DNA, 495 bp, Artificial Sequence
  source: /note="Description of Artificial Sequence: Synthetic polynucleotide"
gcctccctcgcgccatcaggacactctgacgttaactggcaagctgagtctccctaagtggactcagagagggggtggtgaggactcacctgaggagacggtgaccagggttccctggccccaggggtcgaaccagtcgacgacactctgacgttaatcaacagtaatacacggccgtgtcctcggctctcaggctgttcatttgcagataggtgatgcttttggaatcatctcttgagattgtgaatctgcctttcacagacgtggtctattctgttgtcccaccattagctttgtttctaatgaaacctacccactccagccccttcccgggagcctggcggacccagctcatgtagtagtcactgaaggtgaatccagaggctgcacaggagagtctcagggaccccccaggctggaccaagcctcccccggactccaccagctgcacctcacactggacactctgacgttaactgagcgggctggcaaggc

SEQ ID NO: 2414 - DNA, 495 bp, Artificial Sequence
  source: /note="Description of Artificial Sequence: Synthetic polynucleotide"
gcctccctcgcgccatcaggacactctcgtagagtctggcaagctgagtctccctaagtggactcagagagggggtggtgaggactcacctgaggagacggtgaccagggttccctggccccaggggtcgaaccagtcgacgacactctcgtagagttcacacagtaatacgtggctgtgtactcagctctcaaactgttcatttccagataagagtgtgttcttggcattgtttctggagatggggaatcagaacttcccagaatgtgcatagcgtatgctactcccatcagtactaatacatgagacccactccagtctgttccctggagcctggcaggcccagtgcatccagtggctactgaaggcaaatccagaggctgcacaggacagtctcagggacccccacccccaccgcgccaggctgtaccaagtctcccccaggctccaacaactgcgcgacactctcgtagagtctgagcgggctggcaaggc

SEQ ID NO: 2415 - DNA, 495 bp, Artificial Sequence
  source: /note="Description of Artificial Sequence: Synthetic polynucleotide"
gcctccctcgcgccatcaggacactctttccggtactggcaagctgagtctccctaagtggactcagagagggggtggtgaggactcacctgaggagacggtgaccagggttccctggccccaggggtcgaaccagtcgacgacactctttccggtatcacagtaatagacggccatggtgtcagcaatgaaactgtttatttgcagatacagtgagttcttggtgttttctctggagatggtcaaccggcccttcacagagtctgagtagtatatgcctccaccactagcattaatgtaagacccactccagtcccttccctggagcttggtccacctagtgcatgccatagttactgaaagtgtatccagaggctgcacaggagagtcacatggaccccccaagctgtaccaagcctcccccagactctaccagctacacttcacattggacacctgcgacactctttccggtactgagcgggctggcaaggc

SEQ ID NO: 2416 - DNA, 495 bp, Artificial Sequence
  source: /note="Description of Artificial Sequence: Synthetic polynucleotide"
gcctccctcgcgccatcaggacactctgcaattcgctggcaagctgagtctccctaagtggactcagagagggggtggtgaggactcacctgaggagacggtgaccagggttccctggccccaggggtcgaaccagtcgacgacactctgcaattcgtcacatacagtaacacacagctgtgccctctgctctcagactgttcatttgcaaatacagtgagttcttggcattttctttggagacggtgaatctgctcgtcacagattgtgcataacatatctgacttccatcacactgtatatctactactcactccagccccttccctggagcctgggaaaccgagctcattcagtagctactgaaggttaatccagaggctgcacaggagagtctcagggaacccaggttgtcttgggtcctctccagactccaccagctgtacctcacactggacacgacactctgcaattcgctgagcgggctggcaaggc

SEQ ID NO: 2417 - DNA, 495 bp, Artificial Sequence
  source: /note="Description of Artificial Sequence: Synthetic polynucleotide"
gcctccctcgcgccatcaggacactcttgagcgaactggcaagctgagtctccctaagtggactcagagagggggtggtgaggactcacctgaggagacggtgaccagggttccctggccccaggggtcgaaccagtcgacgacactcttgagcgaatcaacagtaatacacagccgtgtcctcggctctcaggctgttcatttgcagatacagtgagttcttggcgttgtctctggagatggtgaatcggcccttcacagagtctgcgtagtatatggtactactactactaatggatgagacccactccagccccttccctggagcctggcggacccagttcatgtagtagtcactgaaggtgaatccagaggctgcacaggagagtctcagggaccccccaggctttaccaagcctcccccagactccaccagctgcacctcacactggacacctgcgacactcttgagcgaactgagcgggctggcaaggc

SEQ ID NO: 2418 - DNA, 495 bp, Artificial Sequence
  source: /note="Description of Artificial Sequence: Synthetic polynucleotide"
gcctccctcgcgccatcaggacactcttactaagcctggcaagctgagtctccctaagtggactcagagagggggtggtgaggactcacctgaggagacggtgaccagggttccctggccccaggggtcgaaccagtcgacgacactcttactaagctcaacagtaatacacggccgtgtccgcggcggtcacagagctcagcttcaggtagaactggttcttggacgtgtctacggacatggtgattcgactcttgagggacgggttgtagtaggtgctcccactatgatggatttccccaatccactccagccccttccctgggggctggcggacccagattcaccagttaccactgctgatggagtcaccagagacagcgcagatgagggacagggtctccgaaggcttcaccagtcctgggcccgactcctgcagctgcacctgggacaggaccccgacactcttactaagcctgagcgggctggcaaggc

SEQ ID NO: 2419 - DNA, 495 bp, Artificial Sequence
  source: /note="Description of Artificial Sequence: Synthetic polynucleotide"
gcctccctcgcgccatcaggacactcttggcgtatctggcaagctgagtctccctaagtggactcagagagggggtggtgaggactcacctgaggagacggtgaccagggttccctggccccaggggtcgaaccagtcgacgacactcttggcgtattcactgcgcccgccccctccgcctccctgcggtcacagagctcagcttcagggaaaactggttcttggacgtttctattgacatggtgactcaactcctgagggacggggtgtagtagctcctcccactataatagatgtatccaatccattccagccccttccctggggactggcggaccagctccaccagttaccactgctgatggagtcaccagagacagcgcatgtgagggacagggtctccgaagcttcaccagtcctgggccccactcctgcagctgcactgggacaggacccctgtgacactcttggcgtatctgagcgggctggcaaggc

SEQ ID NO: 2420 - DNA, 495 bp, Artificial Sequence
  source: /note="Description of Artificial Sequence: Synthetic polynucleotide"
gcctccctcgcgccatcaggacactctgataaccactggcaagctgagtctccctaagtggactcagagagggggtggtgaggactcacctgaggagacggtgaccagggttccctggccccaggggtcgaaccagtcgacgacactctgataaccatcattagatggtccctctcacacaataatacatggcggcgtccgaggccttcaggctgctccactgcaggtaggcggtgctgctggagctgtcggctgagatggtgacgtggccttggaaggatgggctgtatctggtatcagagttcccaggatagatgctccccatccactccagttctttcccgggcatctggcgcacccagtggatccagtagctggtaaagctgtatccagaagtcttacaggagatcctcagagactccccgggtcttttcacctctgctgcagactgcaacagctggacactctgataaccactgagcgggctggcaaggc

SEQ ID NO: 2421 - DNA, 495 bp, Artificial Sequence
  source: /note="Description of Artificial Sequence: Synthetic polynucleotide"
gcctccctcgcgccatcaggacactctctagtgaactggcaagctgagtctccctaagtggactcagagagggggtggtgaggactcacctgaggagacggtgaccagggttccctggccccaggggtcgaaccagtcgacgacactctctagtgaatcagcacgtgtcctcagcctttaggctgctgatatgaagatatgccatgctgacggaggtgtccatggagaagacaaaccgtcctgtgaagccctgggcatacgttaggttcccagtgttggtgttgatccatcccatttcctcaagcccttgtccatgggcctgtcatacccagctgatagcatagcttgtgaaggtgtatccagaagccttgcaggaaaccttcaatgaggctccaggcttcttcacctcaggcccagactgcaccagctgcacctgtgagtggacacctgtggagaggaggacactctctagtgaactgagcgggctggcaaggc

SEQ ID NO: 2422 - DNA, 495 bp, Artificial Sequence
  source: /note="Description of Artificial Sequence: Synthetic polynucleotide"
gcctccctcgcgccatcaggacactctacgttcacctggcaagctgagtctccctaagtggactcagagagggggtggtgaggactcacctgaggagacggtgaccagggttccctggccccaggggtcgaaccagtcgacgacactctacgttcactcaacagtaatactcggccgtgtcctcagcctttaggctgctgatctgaagacacgccgtgctgacagacgtgtccatggagaagacaaaccatcctgtgaagccgtgggtatacgttgggttcccagtgtaggtgatgatccatcacatccactcaaagccctgtccaggggtctatcatacccaattcataccatagatggtgaaggtgtaaccagaagacttataggagaccttcactgaggccccaggcttcttcacctcaggcccagactgcaccagctgcagggagtgggcacctgtgacactctacgttcacctgagcgggctggcaaggc

SEQ ID NO: 2423 - DNA, 448 bp, Artificial Sequence
  source: /note="Description of Artificial Sequence: Synthetic polynucleotide"
gcctccctcgcgccatcaggacactctattacgctctggcaagctgagtctccctaagtggactcagagagggggtggtgaggactcacctgaggagacggtgaccagggttccctggccccaggggtcgaaccagtcgacgacactctattacgcttcatctctcatacagtcatacacggccgtgtcctcagcctttaggctgctgatcttcagatacgccatgctgacagaggtgtccatggagaatagaaaccgtcctgtgaagccgttggtatatgttgggttcccagtgtaggtgatgatccatcccatccactcaagcccttgtccaggggctggtcacactgaattcataccatactggctgcatagtattccatgatttacatatatcatattttatctaatcagacactctattacgctctgagcgggctggcaaggc

SEQ ID NO: 2424 - DNA, 495 bp, Artificial Sequence
  source: /note="Description of Artificial Sequence: Synthetic polynucleotide"
gcctccctcgcgccatcaggacactctcattgagtctggcaagctgagtctccctaagtggactcagagagggggtggtgaggactcacctgaggagacggtgaccagggttccctggccccaggggtcgaaccagtcgacgacactctcattgagttcaacacagtaataaatggctgcatcctcagtctttaggcagctagtctgcagatccgccgtgctgacagaggtgtccatggagaagacaaaccgtgtgtgaatctgtgggcatacattgggttcaccagggtaggatgatccatcccatccactcaagcccctgtcctggggtctgtcgtatccaattcataccataggtgatgacagtttaaccagacaccttgcaggagaccttcgccgaggccccaggctgcttcacctcaggcccagactgcaccagctgcactcgggagtgggcaccgacactctcattgagtctgagcgggctggcaaggc

SEQ ID NO: 2425 - DNA, 495 bp, Artificial Sequence
  source: /note="Description of Artificial Sequence: Synthetic polynucleotide"
gcctccctcgcgccatcagttcggaaccttggttaggcagtagcagaaaacaaaggccctagagtggccattcttacctgaggagacggtgaccgtggtccctttgccccagacgtccatgtagtagtagtagtagtcgacttcggaaccttggttatcaacagtaatacacggccgtgtcgtcagatctcagcctgctcagctccatgtaggctgtgctgatggacgtgtccctggtcatggtgaccctgccctgaaacttctgtgcatagtttgtgccaccactgttagggttgatccatcccatccactcaagcccttgtccaggggcctgtcgcacccagtgcatatagtagccggtgaaggtgtatccagaagccttgcaggagaccttcactgaggccccaggcttcttcacctcagccccagactgcaccagctgcacctgggagtgggctccttcggaaccttggttactgagcgggctggcaaggc

SEQ ID NO: 2426 - DNA, 495 bp, Artificial Sequence
  source: /note="Description of Artificial Sequence: Synthetic polynucleotide"
gcctccctcgcgccatcagttcggaacacctcttgggcagtagcagaaaacaaaggccctagagtggccattcttacctgaggagacggtgaccgtggtccctttgccccagacgtccatgtagtagtagtagtagtcgacttcggaacacctcttgtcaacagtaatacacagccatgtcctcagatctcaggctgctcagctccatgtaggctgtgctcgcggatgtgtccctggtaatggtgactctgccctggaactcctgtgaatattttgtgttaccattgccagcgttgctccatcccatccactcaagcctttgtccgggggcctggcgcacccaatgcatagcatagctagtgaaggtgtatccagaagccttgcaggaaaccttcactgaggccccaggcttcttcacctcagccccagactgcaccagctgaacctgggagtggacaccttcggaacacctcttgctgagcgggctggcaaggc

SEQ ID NO: 2427 - DNA, 495 bp, Artificial Sequence
  source: /note="Description of Artificial Sequence: Synthetic polynucleotide"
gcctccctcgcgccatcagttcggaacctgattctggcagtagcagaaaacaaaggccctagagtggccattcttacctgaggagacggtgaccgtggtccctttgccccagacgtccatgtagtagtagtagtagtcgacttcggaacctgattcttcaacagtaatacacggccgtgtcctcagatctcaggctgctcagctccatgtaggctgtgcttatggaggtgttcctggtcatggtgactctgccctggaacttctgtgcatagcctgtgttaccactgttagggttcatccatcccatccactcaagcccttgtccagtggcctgtcgcacccagttgatatcataactggtgaaggtgtatccagaagccttgcaggagaccttcactgaggccccaggcttcttcacctcagccccagactgcaccagctgcacctgggagtgggcaccttcggaacctgattctctgagcgggctggcaaggc

SEQ ID NO: 2428 - DNA, 495 bp, Artificial Sequence
  source: /note="Description of Artificial Sequence: Synthetic polynucleotide"
gcctccctcgcgccatcagttcggaacagtaccgaggcagtagcagaaaacaaaggccctagagtggccattcttacctgaggagacggtgaccgtggtccctttgccccagacgtccatgtagtagtagtagtagtcgacttcggaacagtaccgatcaacagtaatacacggccgtgtcgtcagatctcaggctcctcagctccatgtaggctgtgctcgtggatgtgtctgtggtcatggtgactctgccctggagcttctgtgcatagtttgtgttaccattgtaagcgctgatccatcccatccactcaagcccttgtccaggggcctgtcgcacccagctgataccatagctggtaaaggtgtaaccagaagccttgcaggagaccttcactgaggccccaggcttcttcacctcagctccagactgcaccagctgaacctgggagtgggcaccttcggaacagtaccgactgagcgggctggcaaggc

SEQ ID NO: 2429 - DNA, 495 bp, Artificial Sequence
  source: /note="Description of Artificial Sequence: Synthetic polynucleotide"
gcctccctcgcgccatcagttcggaacatccatggggcagtagcagaaaacaaaggccctagagtggccattcttacctgaggagacggtgaccgtggtccctttgccccagacgtccatgtagtagtagtagtagtcgacttcggaacatccatggtcaacagtaatacacggccgtgtcctcagatctcaggctgctcagctccatgtaggctgtgtctgtagatgtgtcctcggtcatggtgactctgccctggaacttctgtgcgtagattgtttcaccatcttcaggatcaaaacctcccatccactcaagcccttttccaggagcctgtcgcacccagtgcatggataattcagtgagggtgtatccggaaaccttgcaggagaccttcactgaggccccaggcttcttcacctcagccccagactgtaccagctggacctgggcgtgggtgccttcggaacatccatggctgagcgggctggcaaggc

SEQ ID NO: 2430 - DNA, 495 bp, Artificial Sequence
  source: /note="Description of Artificial Sequence: Synthetic polynucleotide"
gcctccctcgcgccatcagttcggaacgtagcagtggcagtagcagaaaacaaaggccctagagtggccattcttacctgaggagacggtgaccgtggtccctttgccccagacgtccatgtagtagtagtagtagtcgacttcggaacgtagcagttcaacagtaatacatggctgtgtcctcagatctcaggctgctcagctccatgtaggctgtgctcatagacctgtccctggtaatggtgactctgtcctggaatttctgtgcgtagttggtgttaccattgaaaggtgtgatccatcccatccactcaagcgcttgtccgggggcctgtcgcacccagtgcaggtagcggtaggtgaaggtgtatccggaagccttgcaggaaaccttcactgaggacccagtcttcttcacctcagccccagactgcaccagctgcatctgggagtaggcatcttcggaacgtagcagtctgagcgggctggcaaggc

SEQ ID NO: 2431 - DNA, 495 bp, Artificial Sequence
  source: /note="Description of Artificial Sequence: Synthetic polynucleotide"
gcctccctcgcgccatcagttcggaacatcttcgtggcagtagcagaaaacaaaggccctagagtggccattcttacctgaggagacggtgaccgtggtccctttgccccagacgtccatgtagtagtagtagtagtcgacttcggaacatcttcgttcaacagtaatacacggccgtgtcctcagatctcaggctgctcagctccatgtagactgtgctcgtggacgtgtccctggtcatggtgactctgccctggaacttctgtgcgtagcttgtgctaccaccactagggttgattattcccatccactcaagcccttgtccaggggcctgtcgcacccagtgcatatagtagctggtgaaggtgtatccagatgccttgcaggaaaccttcactgaggccccaggcttcttcacctcagccccagactgcaccagctgcacctgggagtgagcaccttcggaacatcttcgtctgagcgggctggcaaggc

SEQ ID NO: 2432 - DNA, 495 bp, Artificial Sequence
  source: /note="Description of Artificial Sequence: Synthetic polynucleotide"
gcctccctcgcgccatcagttcggaactccacagtggcagtagcagaaaacaaaggccctagagtggccattcttacctgaggagacggtgaccgtggtccctttgccccagacgtccatgtagtagtagtagtagtcgacttcggaactccacagttcaacagtaatacacggccgtgtcctcggatctcaggctgctcagctccatgtaggctgtgcttgtggacatgtccctggtaatggtgactctttcctggaacttctgtgcgtagtttgtgttaccactgccaacgacgatccatcctatccactcaaggcgttgtccacgagcctgtcgcacccactgcatagcagagctagtaaaggtgaatccagaagccttgcaggagaccttcactgaggtcccaggcttcttcacctcaggcccagactgcaccagctgcatttgggagtgggcaccttcggaactccacagtctgagcgggctggcaaggc

SEQ ID NO: 2433 - DNA, 495 bp, Artificial Sequence
  source: /note="Description of Artificial Sequence: Synthetic polynucleotide"
gcctccctcgcgccatcagttcggaacagctagtgggcagtagcagaaaacaaaggccctagagtggccattcttacctgaggagacggtgaccgtggtccctttgccccagacgtccatgtagtagtagtagtagtcgacttcggaacagctagtgtcaacagtaatacacggccgtgtcctcagatctcaggctgctcagctccatgtaggctgtgctcgtggatttgtccgcggtaatcgtgactctgccctggaacttctgtgcgtagtttgctgtaccaaagatagggatgatccctcccatccactcaagcccttgtccaggggcctgtcgcacccagctgatagcatagctgctgaaggtgcctccagaagccttgcaggagaccttcaccgaggacccaggcttcttcacctcagccccagactgcaccagctgcacctgggactggacaccttcggaacagctagtgctgagcgggctggcaaggc

SEQ ID NO: 2434 - DNA, 495 bp, Artificial Sequence
  source: /note="Description of Artificial Sequence: Synthetic polynucleotide"
gcctccctcgcgccatcagttcggaactaaccaagggcagtagcagaaaacaaaggccctagagtggccattcttacctgaggagacggtgaccgtggtccctttgccccagacgtccatgtagtagtagtagtagtcgacttcggaactaaccaagtcaatagtaatacacagccatgtcctcagatgtcaggctgctcaggtctgtgtaggctgtggttgtggacatgtccctggtcatggtgaatctgccctgaaacttcttggcatagcttgggctaccattgccagggttgatccatcccatccactcaagcccttgtccaggggactgttgcacccaatgtataccgtagctggtgatggtaaacccagaaaaactacaggagactttcactgaggccccagacttcctcacctcagcccaagactgcaccagctggacctgggagtgggcaccttcggaactaaccaagctgagcgggctggcaaggc

SEQ ID NO: 2435 - DNA, 495 bp, Artificial Sequence
  source: /note="Description of Artificial Sequence: Synthetic polynucleotide"
gcctccctcgcgccatcagttcggaaccaagaggtggcagtagcagaaaacaaaggccctagagtggccattcttacctgaggagacggtgaccgtggtccctttgccccagacgtccatgtagtagtagtagtagtcgacttcggaaccaagaggttcaacagtaatacacggccgtgtcctcagatctcaggctgctcagctccatgtaggctgtgtctgtagacgtgtccgcggttatggtgactctgccctggaacttctctgcgtatattgtttcaccatcttcaggatcaacaagtcccatccactcaagcccttttccaggggcctgttgcacccagtgcatgtagtagtcggtgaaggtgtatccagaaaccttgcaggagattttcactgtagccccaggcttcttcacctcagccccagactgtaccagctggacctcggcgtgggtgccttcggaaccaagaggtctgagcgggctggcaaggc

SEQ ID NO: 2436 - DNA, 495 bp, Artificial Sequence
  source: /note="Description of Artificial Sequence: Synthetic polynucleotide"
gcctccctcgcgccatcagttcggaacagttgaccggcagtagcagaaaacaaaggccctagagtggccattcttacctgaggagacggtgaccgtggtccctttgccccagacgtccatgtagtagtagtagtagtcgacttcggaacagttgacctcatgcacagtaatatgtggctgtgtccacagggtccatgttggtcattgtaaggaccacctggtttttggaggtgtccttggtgatggtgagcctgctcttcagagatgggctgtagcgcttatcatcattccaataaatgagtgcaagccactccagggcctttcctgggggctgacggatccagcccacacccactccactagtgctgagtgagaacccagagaaggtgcaggtcagcgtgagggtctgtgtgggtttcaccagcgtaggaccagactccttcaaggtgatctgggacaattcggaacagttgaccctgagcgggctggcaaggc

SEQ ID NO: 2437 - DNA, 495 bp, Artificial Sequence
  source: /note="Description of Artificial Sequence: Synthetic polynucleotide"
gcctccctcgcgccatcagttcggaaccagcatatggcagtagcagaaaacaaaggccctagagtggccattcttacctgaggagacggtgaccgtggtccctttgccccagacgtccatgtagtagtagtagtagtcgacttcggaaccagcatattcatgcacagtaatatgtggctgtgtccacagggtccatgttggtcatggtaaggaccacctggcttttggaggtgtccttggagatggtgagcctgctcttcagagatgtgctgtaggatttttcgtcattcgaaaaaatgtgtgcaagccactccagggccttccctgggggctgacggatccagctcacacccattctagcattgctgagtgagaacccagagacggtgcaggtcagcgtgagggtctctgtgggtttcaccagcacaggaccagactccttcaaggtgacctgggacaattcggaaccagcatatctgagcgggctggcaaggc

SEQ ID NO: 2438 - DNA, 495 bp, Artificial Sequence
  source: /note="Description of Artificial Sequence: Synthetic polynucleotide"
gcctccctcgcgccatcagttcggaacgcaggattggcagtagcagaaaacaaaggccctagagtggccattcttacctgaggagacggtgaccgtggtccctttgccccagacgtccatgtagtagtagtagtagtcgacttcggaacgcaggatttcatgcacaataatacgtggctgtgtccacagggtccatgttggtcattgtaaggaccacctggtttttggaggtgtccttggagatggtgagcctggtcttcagagatgtgctgtagtatttatcatcatcccaatcaatgagtgcaagccactccagggccttccctgggggctgacggatccagctcacacacattccactagtgctgagtgagaacccagagaaggtgcaggtcagtgtgagggtctgtgtgggtttcaccagcgcaggaccagactccctcaaggtgacctgggataattcggaacgcaggattctgagcgggctggcaaggc

SEQ ID NO: 2439 - DNA, 495 bp, Artificial Sequence
  source: /note="Description of Artificial Sequence: Synthetic polynucleotide"
gcctccctcgcgccatcagttcggaacgtccattcggcagtagcagaaaacaaaggccctagagtggccattcttacctgaggagacggtgaccgtggtccctttgccccagacgtccatgtagtagtagtagtagtcgacttcggaacgtccattctcaacagtaatacacagccgtgtcctcggctctcaggctgttcatttgcagatacagtgagttcttggcgttgtctctggagatggtgaatcggcccttcacagagtccacatagtatttctcacttccatcttgctttatgttggccacccactccagccccttccctggagcctggcggacccagctcatccaatagctactaaaggtgaatccagaggctgcacaggagagtctcagggaccccccaggctggaccaagcctcccccagactccaccagctgcacctcacactggacaccttcggaacgtccattcctgagcgggctggcaaggc

SEQ ID NO: 2440 - DNA, 495 bp, Artificial Sequence
  source: /note="Description of Artificial Sequence: Synthetic polynucleotide"
gcctccctcgcgccatcagttcggaacgcataactggcagtagcagaaaacaaaggccctagagtggccattcttacctgaggagacggtgaccgtggtccctttgccccagacgtccatgtagtagtagtagtagtcgacttcggaacgcataacttcatgcacagtaatacaaggccgtgtcctcagctctcagactgttcatttgcagatacagggagttcttggcgttgtctctggagatggtgaatcggcccttcacagagtccgcatagcctatgctaccactattccaactaatacctgagacccactccaggcccttccctggagcttgccggacccagtgcatggcataatcatcaaaggtgaatccagaggctgcacaggagagtctcagggacctgccaggctgtaccaagcctcccccagactccaccagctgcacttcacactggacttcggaacgcataactctgagcgggctggcaaggc

SEQ ID NO: 2441 - DNA, 495 bp, Artificial Sequence
  source: /note="Description of Artificial Sequence: Synthetic polynucleotide"
gcctccctcgcgccatcagttcggaacatatgctgggcagtagcagaaaacaaaggccctagagtggccattcttacctgaggagacggtgaccgtggtccctttgccccagacgtccatgtagtagtagtagtagtcgacttcggaacatatgctgtcaacagtaatacacggccgtgtcctcggctctcaggctgttcatttgcagatacagtgagttcttggcgttgtccctggagatggtgaatcggcccttcacagagtctgcgtagtatatggtactaccactactactaatgtatgaaacccactccagccccttccctggagcctggcggatccagctcatgtagtagtcactgaaggtgaatccagaggctgcacaggagagtctcagggaccctccaggcttgaccaagcctcccccagactccaccagctgcacctgacactggacaccttcggaacatatgctgctgagcgggctggcaaggc

SEQ ID NO: 2442 - DNA, 495 bp, Artificial Sequence
  source: /note="Description of Artificial Sequence: Synthetic polynucleotide"
gcctccctcgcgccatcagttcggaacaatcctgcggcagtagcagaaaacaaaggccctagagtggccattcttacctgaggagacggtgaccgtggtccctttgccccagacgtccatgtagtagtagtagtagtcgacttcggaacaatcctgctcaacagtaatacacagccgtgtccccggctctcaggctgttcatttgaagatacaaggagttcttggcattttctctggagatggtgaatcggcccttcacggagcctggatagtatgtgtcaccagcagtaccaatagctgagacccactccagaccttttcctgtagcttggcggacccagtgcatgtcgtagctactgaaggtgaatccagaggctgcacaggagagtctcagggaccccccaggctgtaccaagcctcccccagactccaccagctgcacctcacactggacacctgcttcggaacaatcctgcctgagcgggctggcaaggc

SEQ ID NO: 2443 - DNA, 495 bp, Artificial Sequence
  source: /note="Description of Artificial Sequence: Synthetic polynucleotide"
gcctccctcgcgccatcagttcggaactgagacctggcagtagcagaaaacaaaggccctagagtggccattcttacctgaggagacggtgaccgtggtccctttgccccagacgtccatgtagtagtagtagtagtcgacttcggaactgagaccttcaacagtaatacacggctgtgtcctcggttttcaggctgttcatttgcagatacagcgtgttttttgaatcatctcttgagatggtgaatctgcctttcacgggtgcagcgtagtctgttgtcccaccatcagttttgcttttaatacggccaacccactccagccccttccctggagcctggcggacccagctcatccaggcgttactgaaagtgaatccagaggctgcacaggagagtctaagggaccccccaggctttaccaagcctcccccagactccaccagctgcacctcacactgttcggaactgagacctctgagcgggctggcaaggc

SEQ ID NO: 2444 - DNA, 495 bp, Artificial Sequence
  source: /note="Description of Artificial Sequence: Synthetic polynucleotide"
gcctccctcgcgccatcagttcggaacgaatggacggcagtagcagaaaacaaaggccctagagtggccattcttacctgaggagacggtgaccgtggtccctttgccccagacgtccatgtagtagtagtagtagtcgacttcggaacgaatggactcaacagtaatacacagccatgtcctcggctctccgtctgttcttttgcagatacagggagttcctggaattgtctctggagatgatgaatcggcgcttcacggagtccacatagtgcgtcctactgccattccaactaacacccgatacccactccagcccctttcctggagccttgcgggcccagttcatgtcactgttactgaaggtgaatccagaggctgcacaggagagtctcagggaccccccaggctgtaccaagcctcccccagactccaccagctgcacctcacactggacaccttcggaacgaatggacctgagcgggctggcaaggc

SEQ ID NO: 2445 - DNA, 495 bp, Artificial Sequence
  source: /note="Description of Artificial Sequence: Synthetic polynucleotide"
gcctccctcgcgccatcagttcggaaccacatggaggcagtagcagaaaacaaaggccctagagtggccattcttacctgaggagacggtgaccgtggtccctttgccccagacgtccatgtagtagtagtagtagtcgacttcggaaccacatggatcaacagtgatacaaggccgtgtcctcggctctcagactgttcatttgcagatacagggagttcttggcgttgtctctggagatggtgaatcggcccttcacagagtctgcataacctgtgctaccaccattccaattaataccagagacccactccagccccttccctggagcttggcggacccagctcatgccataatcatcaaaggtgaatccagaggctgcacaggagagtctcagggaccccccaggccgtaccacacctcccccagactccaccagctgcacctcacactggacaccttcggaaccacatggactgagcgggctggcaaggc

SEQ ID NO: 2446 - DNA, 495 bp, Artificial Sequence
  source: /note="Description of Artificial Sequence: Synthetic polynucleotide"
gcctccctcgcgccatcagttcggaacttgaccatggcagtagcagaaaacaaaggccctagagtggccattcttacctgaggagacggtgaccgtggtccctttgccccagacgtccatgtagtagtagtagtagtcgacttcggaacttgaccattcaacagtaatacacagccgtgtcctcggctctcaggctgttcatttgcagatacagtgagttcttggcgttgtctctggagatggtgaatcggcccttcactgagtctgcgtagtatatgtaactactactactactaatggatgagacccactccagccccttccctggagcctggcggacccagttcatgctatagctactgaaggtgaatccagaggctgcacaggagagtctcagggaccccccaggcttgaccaggcctcccccagactccaccagctgcacctcacactggacaccttcggaacttgaccatctgagcgggctggcaaggc

SEQ ID NO: 2447 - DNA, 495 bp, Artificial Sequence
  source: /note="Description of Artificial Sequence: Synthetic polynucleotide"
gcctccctcgcgccatcagttcggaacaagccatcggcagtagcagaaaacaaaggccctagagtggccattcttacctgaggagacggtgaccgtggtccctttgccccagacgtccatgtagtagtagtagtagtcgacttcggaacaagccatctcaacagtaatatacggccgtgtcctcggctctcaggctgttcatttgcagatacagcgtgttcttggaattgtctctggagatggtgaaccggcccttcacggagtctgcgtagtatgtgctaccaccactaccactaatagctgagacccactccagccccttccctggagcctggcggacccagctcatggcatagctgctaaaggtgaatccagaggctgcacaggagagtctcagggaccccccaggctgtaccaagcctcccccagactccaacagctgcacctcacactggacaccttcggaacaagccatcctgagcgggctggcaaggc

SEQ ID NO: 2448 - DNA, 495 bp, Artificial Sequence
  source: /note="Description of Artificial Sequence: Synthetic polynucleotide"
gcctccctcgcgccatcagttcggaactccatgtgggcagtagcagaaaacaaaggccctagagtggccattcttacctgaggagacggtgaccgtggtccctttgccccagacgtccatgtagtagtagtagtagtcgacttcggaactccatgtgtcaacagtaatacacagccgtgtcctcagctctcaggctgttcatttgcagatacagcgtgttcttggaattgtctctggagatggtgaatcggcccttcacggagtctgcatagtatttattacttccatcatatgatataactgccacccactccagccccttgcctggagcctggcggacccagtgcatgccatagctactgaaggtgaatccagaggctgcacaggagagtctcagggacctcccaggctggaccacgcctcccccagactccaccagctgcacctgacactggacaccttcggaactccatgtgctgagcgggctggcaaggc

SEQ ID NO: 2449 - DNA, 495 bp, Artificial Sequence
  source: /note="Description of Artificial Sequence: Synthetic polynucleotide"
gcctccctcgcgccatcagttcggaaccaagtcacggcagtagcagaaaacaaaggccctagagtggccattcttacctgaggagacggtgaccgtggtccctttgccccagacgtccatgtagtagtagtagtagtcgacttcggaaccaagtcactcaacagtaatacacagccgtgtcctcagctctcaggctgttcatttgcagatacagcgtgttcttggaattgtctctggagatggtgaatcggcccttcacggagtctgcatagtatttattacttccatcatatgatataactgccacccactccagccccttgcctggagcctggcggacccagtgcatgccatagctactgaaggtgaatccagaggctgcacaggagagtctcagggacctcccaggctggaccacgcctcccccagactccaccagctgcacctgacactggacaccttcggaaccaagtcacctgagcgggctggcaaggc

SEQ ID NO: 2450 - DNA, 495 bp, Artificial Sequence
  source: /note="Description of Artificial Sequence: Synthetic polynucleotide"
gcctccctcgcgccatcagttcggaacctgcaatcggcagtagcagaaaacaaaggccctagagtggccattcttacctgaggagacggtgaccgtggtccctttgccccagacgtccatgtagtagtagtagtagtcgacttcggaacctgcaatctcaacagtaatacacagccgtgtcctcggctctcaggctgttcatttgcagatacagcgtgttcttggaattgtctctggagatggtgaatcggcccttcacggagtctgcatagtatttattacttccatcataccatataactgccacccactccagccccttgcctggagcctggcggacccagtgcatgccatagctactgaaggtgaatccagacgctgcacaggagagtctcagggacctcccaggctggaccacgcctcccccagactccaccagctgcacctgacactggacaccttcggaacctgcaatcctgagcgggctggcaaggc

SEQ ID NO: 2451 - DNA, 495 bp, Artificial Sequence
  source: /note="Description of Artificial Sequence: Synthetic polynucleotide"
gcctccctcgcgccatcagttcggaacatcgacgaggcagtagcagaaaacaaaggccctagagtggccattcttacctgaggagacggtgaccgtggtccctttgccccagacgtccatgtagtagtagtagtagtcgacttcggaacatcgacgatcaacagtaatacacagccgtgtcctcggccctcaggctattcgtttgcagatacagggtgttcctggaattgtctctggagatgatgaatcggcccttcacagagtctgcatagtgcgtcctactgccattccaactaacacccgatacccactccagcccctttcctggagcctgatggacccagttcatgtcactgttactgaaggtgaatccagaggctgcacaggagagtctcagggatcccccaggctgtaccaagcctcccccagactccaccagctgcacctcacactggacaccttcggaacatcgacgactgagcgggctggcaaggc

SEQ ID NO: 2452 - DNA, 495 bp, Artificial Sequence
  source: /note="Description of Artificial Sequence: Synthetic polynucleotide"
gcctccctcgcgccatcagttcggaacacagactgggcagtagcagaaaacaaaggccctagagtggccattcttacctgaggagacggtgaccgtggtccctttgccccagacgtccatgtagtagtagtagtagtcgacttcggaacacagactgtcaacagtaatacacggccgtgccctcagctctcaggttgttcatttgaagatacagcgtgttcttggaattgtctctggagatggtgaatctgcccttcctggagtctgcgtagtatgtgctaccaccactaatggatgagacccactccagccccttccctggagcctggcggatccagctcatctcattgctactgacggtgaatccagaggctgcacaggagagtctcagggaccccctaggctgtaccaagcctcccccagactccaccagctgcacctcacactggacacctgcaaattcggaacacagactgctgagcgggctggcaaggc

SEQ ID NO: 2453 - DNA, 495 bp, Artificial Sequence
  source: /note="Description of Artificial Sequence: Synthetic polynucleotide"
gcctccctcgcgccatcagttcggaacccttatagggcagtagcagaaaacaaaggccctagagtggccattcttacctgaggagacggtgaccgtggtccctttgccccagacgtccatgtagtagtagtagtagtcgacttcggaacccttatagtcatgcacagtaatacaaggcggtgtcctcagttctcagactgttcatttgcagatacagggagtttttgctgttgtctctggagatggtgaatcggcccttcacagagtctgcatagtatgtgctaccaccatcccaactaataagagagacccactccagacccttccccggagcttgacggacccagtgcatggtataatcatcaaaggtgaatccagaggctgcacaggagagtctcagggaccccccaggctgtaccacgactcccccagactccaccagctgcacttcacactggacttcggaacccttatagctgagcgggctggcaaggc

SEQ ID NO: 2454 - DNA, 495 bp, Artificial Sequence
  source: /note="Description of Artificial Sequence: Synthetic polynucleotide"
gcctccctcgcgccatcagttcggaactacgcgttggcagtagcagaaaacaaaggccctagagtggccattcttacctgaggagacggtgaccgtggtccctttgccccagacgtccatgtagtagtagtagtagtcgacttcggaactacgcgtttcaacagtaatacacagccgtgtcctcgtctctcaggctgttcatttgcagatacagtgagttcttggcattgtctctggagatggtgaatcggcccttcacagagtctgcgtagtatatggtactactactactactaatgtatgaaacccactccagccccttccctggagcctggcggacccagttcatgctatagctactgaaggtgaatccagaggctgcacaggagagtctcagggaccccccaggctgtaccaagcctcccccagactccaccagctgcacctcacactggacaccttcggaactacgcgttctgagcgggctggcaaggc

SEQ ID NO: 2455 - DNA, 495 bp, Artificial Sequence
  source: /note="Description of Artificial Sequence: Synthetic polynucleotide"
gcctccctcgcgccatcagttcggaacctataaggggcagtagcagaaaacaaaggccctagagtggccattcttacctgaggagacggtgaccgtggtccctttgccccagacgtccatgtagtagtagtagtagtcgacttcggaacctataaggtcaacagtaatacacggctgtgtcctcggttttcaggctgttcatttgcagataggcgatgcttttggaatcatctcttgagatggtgaatctgcctttcacagacgcggcgtattctgttgtcccaccataagctttgcttctaatgaaacctacccactccagccccttccctggagcctggcggaaccagctcatagcataatcaccaaaggtgaatccagaagctgtacaggagagtctcagggaccgccctggctgtaccaagcctcccccagactccaccagctgcacctcacattgttcggaacctataaggctgagcgggctggcaaggc

SEQ ID NO: 2456 - DNA, 495 bp, Artificial Sequence
  source: /note="Description of Artificial Sequence: Synthetic polynucleotide"
gcctccctcgcgccatcagttcggaactcttagtcggcagtagcagaaaacaaaggccctagagtggccattcttacctgaggagacggtgaccgtggtccctttgccccagacgtccatgtagtagtagtagtagtcgacttcggaactcttagtctcaacagtaatacacggccgtgtcctcggctctcaggctgttcatttgaagatacagcgtgttcttggaattgtctctggagatggtgaatcggcccttcacggagtctgcgtagtatgtgctaccaccgctataaataactgagacccactccagccccttccctggagcctggcggacccagctcatgtagttgctactgacggtgaacccagaggctgcacaggagagtctcagggaccccccaggctggatcaagcctcctccagactccaccagctgcacctcacactggacacctgcttcggaactcttagtcctgagcgggctggcaaggc

SEQ ID NO: 2457 - DNA, 495 bp, Artificial Sequence
  source: /note="Description of Artificial Sequence: Synthetic polynucleotide"
gcctccctcgcgccatcagttcggaactgtctgcaggcagtagcagaaaacaaaggccctagagtggccattcttacctgaggagacggtgaccgtggtccctttgccccagacgtccatgtagtagtagtagtagtcgacttcggaactgtctgcatcaacagtaatacacagccatgtcctcagctctcaggctgcccatttgaagatacagcgtgttcttggaattgtctctggagatggtgaatctgcccttcacagagtctgcataatatgtgctacccccattactactaatagctgaaacatattccagtcccttccctggagcctggcggacccagtgcatagcatagctactgaaggtgaatccagaggctgcacaggagagtctcagggaccccccaggctggaccaagccttccccagactccaccagctgcacctcacactggacaccttcggaactgtctgcactgagcgggctggcaaggc

SEQ ID NO: 2458 - DNA, 495 bp, Artificial Sequence
  source: /note="Description of Artificial Sequence: Synthetic polynucleotide"
gcctccctcgcgccatcagttcggaacgccattaaggcagtagcagaaaacaaaggccctagagtggccattcttacctgaggagacggtgaccgtggtccctttgccccagacgtccatgtagtagtagtagtagtcgacttcggaacgccattaatcaacagtaatacacagccgtgtcctcagctctcaggctgttcatttgaagatacagcgtgttcttggaattgtctctggagatggtgaatcggcccttcacggagtctgcgtagtatgtgctaccacagctataaataactgagacccactccagccccttccctggagcctggcggacccagctcatgtagttgctactgacggtgaacccagaggctgcacaggagagtctcagggaccccccaggctggatcaagcctcctccagactccaccagctgcacctcacactggacacctgcttcggaacgccattaactgagcgggctggcaaggc

SEQ ID NO: 2459 - DNA, 495 bp, Artificial Sequence
  source: /note="Description of Artificial Sequence: Synthetic polynucleotide"
gcctccctcgcgccatcagttcggaacgactaagaggcagtagcagaaaacaaaggccctagagtggccattcttacctgaggagacggtgaccgtggtccctttgccccagacgtccatgtagtagtagtagtagtcgacttcggaacgactaagatcaacagtaatacacggccgtgtcctcggttttcaggctgttcatttgcagatacagtgagttctttgaatcatctcttgagatggtgaatctgcctttcacagacgcggcgtattctgtggtgtaactgttagctttgtttctagtacggccaacccactccagccccttccctggagcctggcggacccagtccatgtagtggtcactgaaggtgaatccagaggctgcacaggagagtctcagggaccctccaggctggaccaagcctcccccagactccaccagctgcacctcacactgttcggaacgactaagactgagcgggctggcaaggc

SEQ ID NO: 2460 - DNA, 495 bp, Artificial Sequence
  source: /note="Description of Artificial Sequence: Synthetic polynucleotide"
gcctccctcgcgccatcagttcggaacaggttgctggcagtagcagaaaacaaaggccctagagtggccattcttacctgaggagacggtgaccgtggtccctttgccccagacgtccatgtagtagtagtagtagtcgacttcggaacaggttgcttcaacagtaatacacggccgtgtcctcggttttcaggctgttcatttgcagatacgccgtgttctttgaatcatctctggagatggtgaacctgcctttcaccgacgcagcatatgctgtcgcgtaactgttagctttgcttctaatacggccaacccactccagccctttcccggaagcctggcggacccagtgcatagcagagccactgaaggtgaacccagaggctgcacaggagagtttcagggaccccccaggctggaccaagcctcccccggactccaccagctgcacctcacactgttcggaacaggttgctctgagcgggctggcaaggc

SEQ ID NO: 2461 - DNA, 495 bp, Artificial Sequence
  source: /note="Description of Artificial Sequence: Synthetic polynucleotide"
gcctccctcgcgccatcagttcggaacctcgagaaggcagtagcagaaaacaaaggccctagagtggccattcttacctgaggagacggtgaccgtggtccctttgccccagacgtccatgtagtagtagtagtagtcgacttcggaacctcgagaatcaacagtaatacacagccgtgtcctcggctctcagactgttcatttgcagatacagcgtgttcttggcgttgtctctggagatggtgaatcggcccttcacggagtccgcgtagcttgtgctactcccatcactattaatacgtgagacccacaccagccccttccctggagcttggcggacccagtgcatccagtagctactgaaggtgaatccagaggctgcacaggagagtctcagggaccccccaggctgaactaagcctcccccggactccaccagctgcacctcacactggacaccttcggaacctcgagaactgagcgggctggcaaggc

SEQ ID NO: 2462 - DNA, 495 bp, Artificial Sequence
  source: /note="Description of Artificial Sequence: Synthetic polynucleotide"
gcctccctcgcgccatcagttcggaacttaatggcggcagtagcagaaaacaaaggccctagagtggccattcttacctgaggagacggtgaccgtggtccctttgccccagacgtccatgtagtagtagtagtagtcgacttcggaacttaatggctcaacagtaatacacagccgtgtcctcagctctcaggctgttcatttgcagatacagcgtgttcttggaattgtctctggagatggtgaatcggcccttcacggagtctgcatagtatttattacttccatcataccgtataaatgccacccactccagccccttgcctggagcctggcggacccagtgcatgccatagctactgaaggtgaatccagacgctgcacaggagagtctcagggaccccccaggctggaccacgcctcccccagactccaccagctgcacctgacactggacaccttcggaacttaatggcctgagcgggctggcaaggc

SEQ ID NO: 2463 - DNA, 495 bp, Artificial Sequence
  source: /note="Description of Artificial Sequence: Synthetic polynucleotide"
gcctccctcgcgccatcagttcggaactgcagacaggcagtagcagaaaacaaaggccctagagtggccattcttacctgaggagacggtgaccgtggtccctttgccccagacgtccatgtagtagtagtagtagtcgacttcggaactgcagacatcaacagtaatacacagccgtgtcctcagctctcaggctgttcatttgaagatgcagcgtgttcttggaattgtctctggagatggtgaatctgcccttcctggagtctgcgtagtatgtgctaccaccactaatggatgagacccactccagacccttccctggagcctggcggacccagctcatctcattgctactgacggtgaatccagaggctgcacaggagagtctcagggaccccccaggctgtaccaagactccccgagactccaccagctgcacctcacactggacacctgcaaattcggaactgcagacactgagcgggctggcaaggc

SEQ ID NO: 2464 - DNA, 495 bp, Artificial Sequence
  source: /note="Description of Artificial Sequence: Synthetic polynucleotide"
gcctccctcgcgccatcagttcggaactcactgagggcagtagcagaaaacaaaggccctagagtggccattcttacctgaggagacggtgaccgtggtccctttgccccagacgtccatgtagtagtagtagtagtcgacttcggaactcactgagtcaacagtaatacacggccgtgtccgcggcggtcacagagctcagcttcagggagaactggttcttggacgtgtctactgacatggtgactcgactcttgagggaggggttgtagttggtgctcccactggtatagatacgcccaatccactccagtcccttcccggcgggctgccggatccagctccagtagtaactactgatggagccaccagagacagtgcaggtgagggacagggtctccgaaggcttcaccagtcctgggcccgactcctgcagctgcacctgggacaggacccctgtttcggaactcactgagctgagcgggctggcaaggc

SEQ ID NO: 2465 - DNA, 495 bp, Artificial Sequence
  source: /note="Description of Artificial Sequence: Synthetic polynucleotide"
gcctccctcgcgccatcagttcggaacgagtacgtggcagtagcagaaaacaaaggccctagagtggccattcttacctgaggagacggtgaccgtggtccctttgccccagacgtccatgtagtagtagtagtagtcgacttcggaacgagtacgttcaacagtaatacacggccgtgtccacggcggtcacagagctcagcttcagggagaactggttcttggacgtgtctactgacatggtgactcgactcttgagggacgggttgtagtaggtgctcccactataatagatgtacccaatccactccagtcccttccctgggggctgccggatccagccccaccagttactactgctgatggagtaaccagagacagcgcaggtgagggacagggtgtccgaaggcttcaccagtcctgggcccgactcctgcagctgcacctgggacaggaccacttcggaacgagtacgtctgagcgggctggcaaggc

SEQ ID NO: 2466 - DNA, 495 bp, Artificial Sequence
  source: /note="Description of Artificial Sequence: Synthetic polynucleotide"
gcctccctcgcgccatcagttcggaacatacgccaggcagtagcagaaaacaaaggccctagagtggccattcttacctgaggagacggtgaccgtggtccctttgccccagacgtccatgtagtagtagtagtagtcgacttcggaacatacgccatcaacagtaatacacggccgtgtccgcggcggtcacagagctcagcttcagggagaactggttcttggacctgtctactgatatggtgactcgactcttgagggacgggttgtagtaggtgctcccactatgatagatgtacccaatccactccaggcccttccctggtggctgccggatccagctccaggagtaaccaccactgctgatggagccaccagagacagcgcaggtgagggacagggtctgtgaaggcttcaccagtcctgagccggactcctgcagctgcagctgggacaggacttcggaacatacgccactgagcgggctggcaaggc

SEQ ID NO: 2467 - DNA, 495 bp, Artificial Sequence
  source: /note="Description of Artificial Sequence: Synthetic polynucleotide"
gcctccctcgcgccatcagttcggaactcgcatcaggcagtagcagaaaacaaaggccctagagtggccattcttacctgaggagacggtgaccgtggtccctttgccccagacgtccatgtagtagtagtagtagtcgacttcggaactcgcatcatcaacagtaatacacggccgtgtctgcggcagtcacagagctcagcttcagggagaactggttcttggacgtgtctactgatatggtaactcgactcttgagggacgggttgtagtaggtgctcccactgtaatagatgtacccaatccactccaggcccttccctgggggctggcggatccaactccagtagtaatcaccactgctgatggagccaccagagacagtgcaggtgagggacagggtctgtgaaggcttcaccagtcctgggcccgactcctgcagctgcacctgggacaggacttcggaactcgcatcactgagcgggctggcaaggc

SEQ ID NO: 2468 - DNA, 495 bp, Artificial Sequence
  source: /note="Description of Artificial Sequence: Synthetic polynucleotide"
gcctccctcgcgccatcagttcggaaccgcttaatggcagtagcagaaaacaaaggccctagagtggccattcttacctgaggagacggtgaccgtggtccctttgccccagacgtccatgtagtagtagtagtagtcgacttcggaaccgcttaattcaacagtaatacacggccgtgtccgcggcagtcacagagctcagcttcagggagaactggttcttagacgtgtctactgatatggtaactcgactcttgagggacgggttgtagtaggtgctcccactgtaatagatgtacccaatccactccaggcccttccctgggtgctggcggatccagctccagtagtaaccaccactgctgatggagccaccagagacagtacaggtgagggacagggtctgtgaaggcttcaccagtcctgggcccgactcctgcagctgcacctggggcaggacttcggaaccgcttaatctgagcgggctggcaaggc

SEQ ID NO: 2469 - DNA, 495 bp, Artificial Sequence
  source: /note="Description of Artificial Sequence: Synthetic polynucleotide"
gcctccctcgcgccatcagttcggaactggttatcggcagtagcagaaaacaaaggccctagagtggccattcttacctgaggagacggtgaccgtggtccctttgccccagacgtccatgtagtagtagtagtagtcgacttcggaactggttatctcaacagtaatacacagccgtgtccgcggcggtcacagagctcagcttcagggagaactggttcttggacgtgtctactgatatggtgactcgactcttgagggacgggttgtagttggtgcttccactatgattgatttccccaatccactccagccccttccctgggggctggcggatccagctccagtagtaaccactgaaggacccaccatagacagcgcaggtgagggacagggtctccgaaggcttcaacagtcctgcgccccactgctgtagctgcacctgggacaggacccctgtttcggaactggttatcctgagcgggctggcaaggc

SEQ ID NO: 2470 - DNA, 495 bp, Artificial Sequence
  source: /note="Description of Artificial Sequence: Synthetic polynucleotide"
gcctccctcgcgccatcagttcggaacggattgctggcagtagcagaaaacaaaggccctagagtggccattcttacctgaggagacggtgaccgtggtccctttgccccagacgtccatgtagtagtagtagtagtcgacttcggaacggattgcttcaacagtaatacacagccgtgtctgcggcggtcacagagctcagcttcagggagaactggttcttggacgtgtctacggatatggtgactcgactcttgagggacgggttgtagtaggtgctcccactataatagatactcccaatccactccagccccttccctgggggctggcggatccagccccagtagtaactactactgctgatggagccaccagagacagtgcaggtgagggacagggtctccgaaggcttcaccagtcctgggcccgactcctgcagctgcagctgggacaggacttcggaacggattgctctgagcgggctggcaaggc

SEQ ID NO: 2471 - DNA, 495 bp, Artificial Sequence
  source: /note="Description of Artificial Sequence: Synthetic polynucleotide"
gcctccctcgcgccatcagttcggaacctcagtgaggcagtagcagaaaacaaaggccctagagtggccattcttacctgaggagacggtgaccgtggtccctttgccccagacgtccatgtagtagtagtagtagtcgacttcggaacctcagtgatcaacagtaatacacggccgtgtccgcagcggtcacagagctcagcttcagggagaactggttcttggacgtgtctactgatatggtgactcgactcttgagggaggggttgtagttggtgctcccactgtaatagatatacccaatccactccagtcccttccctgggggctgccggatccagctccagtagtaactactgatggagccaccagagacagtgcaggtgagggacagggtctccgaaggcttcaccagtcctgggcccgactcctgcagctgcacctgggacaggacccctgtttcggaacctcagtgactgagcgggctggcaaggc

SEQ ID NO: 2472 - DNA, 495 bp, Artificial Sequence
  source: /note="Description of Artificial Sequence: Synthetic polynucleotide"
gcctccctcgcgccatcagttcggaacacgtactcggcagtagcagaaaacaaaggccctagagtggccattcttacctgaggagacggtgaccgtggtccctttgccccagacgtccatgtagtagtagtagtagtcgacttcggaacacgtactctcaacagtaatacacggccgtgtccgcagcggtcacagagctcagcttcagggagaactggttcttggacgtgtctactgatatggtgactcgactcttgagggaggggttgtagttggtgctcccactgtaatagatatacccaatccactccagtcccttccctgggggctgccggatccagctccagtagtaaccaccactgctgacggagccaccagagacagtgcaggtgagggacagggtctccgaaggcttcaccagtcctgggcccgactcctgcagctgcacctgggacaggacttcggaacacgtactcctgagcgggctggcaaggc

SEQ ID NO: 2473 - DNA, 495 bp, Artificial Sequence
  source: /note="Description of Artificial Sequence: Synthetic polynucleotide"
gcctccctcgcgccatcagttcggaactgatgcgaggcagtagcagaaaacaaaggccctagagtggccattcttacctgaggagacggtgaccgtggtccctttgccccagacgtccatgtagtagtagtagtagtcgacttcggaactgatgcgatcaacagtaatacacggccgtgtctgcggcggtcacagagctcagcttcagggagaactggttcttggacgtgtctactgatatggtgactcgactcttgagggacgggttgtagtaggtgctcccactatgatagatactcccaatccactccagccccttccctgggggctgccggatccagccccagtagtaaccactgctgatggagtaaccagagacagcgcaggtgagggacagggtctccgaaggcttcaccagtcctgggcccgactcctgcagctgcacctgggacaggaccccttcggaactgatgcgactgagcgggctggcaaggc

SEQ ID NO: 2474 - DNA, 495 bp, Artificial Sequence
  source: /note="Description of Artificial Sequence: Synthetic polynucleotide"
gcctccctcgcgccatcagttcggaacattaagcgggcagtagcagaaaacaaaggccctagagtggccattcttacctgaggagacggtgaccgtggtccctttgccccagacgtccatgtagtagtagtagtagtcgacttcggaacattaagcgtcaacagtaatacatggcggtgtccgaggccttcaggctgctccactgcaggtaggcggtgctgatggacttgtcggctgagatggtgacctggccttggaaggacgggctgtatctggtatcagagtcaccaggatagatgatccccatccactccaggcctttcccgggcatctggcgcacccagccgatccagtagctggtaaagctgtatccagaacccttacaggagatcttcagagactccccgggctttttcacctctgctccagactgcaccagctgcacctcggcacagactccttcggaacattaagcgctgagcgggctggcaaggc

SEQ ID NO: 2475 - DNA, 495 bp, Artificial Sequence
  source: /note="Description of Artificial Sequence: Synthetic polynucleotide"
gcctccctcgcgccatcagttcggaacagcaatccggcagtagcagaaaacaaaggccctagagtggccattcttacctgaggagacggtgaccgtggtccctttgccccagacgtccatgtagtagtagtagtagtcgacttcggaacagcaatcctcaacagtaatacatggcggtgtccgaggccttcaggctgctccactgcaggtaggcagtgctgatggacttgtcagctgagatggtgacgtggccttggaaggacgggctgtagttggtataagagtcactaggatcaatcctccccatccactccaagcctttcccgggcatctggcgcacccagctgatccagtagctggtaaagctgtatccagaacccttacaggagatcctcagagactccccgggctttttcacctctgctccagactgcaccagctgcacttcggcacagactccttcggaacagcaatccctgagcgggctggcaaggc

SEQ ID NO: 2476 - DNA, 495 bp, Artificial Sequence
  source: /note="Description of Artificial Sequence: Synthetic polynucleotide"
gcctccctcgcgccatcagttcggaacgcttagtaggcagtagcagaaaacaaaggccctagagtggccattcttacctgaggagacggtgaccgtggtccctttgccccagacgtccatgtagtagtagtagtagtcgacttcggaacgcttagtatcaacagtaatacacagccgtgtcctcgggagtcacagagttcagctgcagggagaactggttcttggatgtgtctgggttgatggttattcgacttttcacagatactgcataatcattataccacttggacctgtagtatgtccttcccagccactcaaggcctctcgatggggactgcctgatccagttccaagcagcactgttgctagagacactgtccccggagatggcacaggtgagtgagagggtctgcgagggcttcaccagtcctggacctgactgctgcagctgtacctgtgattcggaacgcttagtactgagcgggctggcaaggc

SEQ ID NO: 2477 - DNA, 495 bp, Artificial Sequence
  source: /note="Description of Artificial Sequence: Synthetic polynucleotide"
gcctccctcgcgccatcagttcggaactgaccttgggcagtagcagaaaacaaaggccctagagtggccattcttacctgaggagacggtgaccgtggtccctttgccccagacgtccatgtagtagtagtagtagtcgacttcggaactgaccttgtcaacagtaatacacggcagtgtcctcagcctttaggctgcagatctgcagatatgccgtgctgacagaggtgtccaaggagaagacaaaccgtcctgtgaagccctgggcatacgttgggttcccagtgttggtgttgatccatcccatccactcaagcccttgtccaggggcctgtcgcacccaattcatagcatagctagtgaaggtgtatccagaagccttgcaggaaaccttcactgaggccccaggcttcttcaactcagacccagattgcaccagctgcacctgggagtgggcaccttcggaactgaccttgctgagcgggctggcaaggc

SEQ ID NO: 2478 - DNA, 495 bp, Artificial Sequence
  source: /note="Description of Artificial Sequence: Synthetic polynucleotide"
gcctccctcgcgccatcagttcggaaccaaggtcaggcagtagcagaaaacaaaggccctagagtggccattcttacctgaggagacggtgaccgtggtccctttgccccagacgtccatgtagtagtagtagtagtcgacttcggaaccaaggtcatcaacagtaatacatggccatgtcctcagcctttaggctgctgatctgcaggtatgctgtgctggcagaggtgtccatggagaagacaaaccgtcctgtgaagccctgggcatatgttgggttcccagtgtaggtgttgaaccatcccatccactcaagcccttgtccaggggcctgtggcacccaattcataccataggtggtgaaactgtaaccagaagccttgcaggagaccttcactgaggccccaggctgcttcacctcatggccagactgcaccagctgcacctgggagtaggtaccttcggaaccaaggtcactgagcgggctggcaaggc

SEQ ID NO: 2479 - DNA, 495 bp, Artificial Sequence
  source: /note="Description of Artificial Sequence: Synthetic polynucleotide"
gcctccctcgcgccatcagttcggaaccactgtacggcagtagcagaaaacaaaggccctagagtggccattcttacctgaggagacggtgaccgtggtccctttgccccagacgtccatgtagtagtagtagtagtcgacttcggaaccactgtactcagggaatgtgcggccctgcccttggccatcacggagctcagctgcagggataactgggccttggatgtgtctctacagatggagagttggcccagaaaggctgggctgaagtgtgtgctgcccctggagctgaggtgccccagcgccttcccagagggctgctgggtccaggcccagaggtctgtgaggacctcaccagccctgggcatgactccagtagctgcatctgatgcaggacactcagggacaagaagcaaagagatgagtcacaagcggacaccacagcccacagcccccgttcttcggaaccactgtacctgagcgggctggcaaggc

SEQ ID NO: 2480 - DNA, 495 bp, Artificial Sequence
  source: /note="Description of Artificial Sequence: Synthetic polynucleotide"
gcctccctcgcgccatcagttcggaacgatgatccggcagtagcagaaaacaaaggccctagagtggccattcttacctgaggagacggtgaccgtggtccctttgccccagacgtccatgtagtagtagtagtagtcgacttcggaacgatgatcctcagtataaaaatccatggtggtttactcattgtgcgggtagctcagctgtaggaaaaactgttttctgaatgtggatctggaggtggtgactggactcttgagaagcgggttgcactgtgtgtttcctcgtgacctacacacctgacccacttcagcttcttccctgggggctggcagatacagctccaggaggaagtactggttatgattggaaatccagagacagcacaggtgaaggagagggtctctgagggctttactagaacatgagtgcactgaaaaacacaatttttttcataggttcggaacgatgatccctgagcgggctggcaaggc

SEQ ID NO: 2481 - DNA, 495 bp, Artificial Sequence
  source: /note="Description of Artificial Sequence: Synthetic polynucleotide"
gcctccctcgcgccatcagttcggaaccgccaataggcagtagcagaaaacaaaggccctagagtggccattcttacctgaggagacggtgaccgtggtccctttgccccagacgtccatgtagtagtagtagtagtcgacttcggaaccgccaatatcaataaaaatcatggttgtgtactccttgttaaggtagctcagctgtaggagaaactgttttttggatgtggatctggagatggtgactggactcttgaggagtgggttggattgtgcactccctcatgacctgtgcacctgattcgctccagtcccttccccggggggtgacggatccagctccagcaggaagcactggttgtaatggagaagcagagatgccacaggccagggggaggatctgtgagggcttcaccaggccaggagtgcaccgagaatcacagttgtcggcatgcacaggttcggaaccgccaatactgagcgggctggcaaggc

SEQ ID NO: 2482 - DNA, 495 bp, Artificial Sequence
  source: /note="Description of Artificial Sequence: Synthetic polynucleotide"
gcctccctcgcgccatcagttcggaactcaagcctggcagtagcagaaaacaaaggccctagagtggccattcttacctgaggagacggtgaccgtggtccctttgccccagacgtccatgtagtagtagtagtagtcgacttcggaactcaagccttcacagtaatactcagccgtgtcctaggtggtcatggagctgagcttcacagagaactggctcttggttgagtcactgttgatggggacatggacctgggtggagggtgcatgatgtgtattccttgatgatccagtctagtaactgtgccccagccattccagcctgttgcccacgggatggtggattcatctcaaataatatccatggtaaaaaaaagaatccagacacagcacaggcagagggcagtgtctgagggcctcatgggtcctggacctgactcctgcagctgcacctgggacattcggaactcaagcctctgagcgggctggcaaggc

SEQ ID NO: 2483 - DNA, 495 bp, Artificial Sequence
  source: /note="Description of Artificial Sequence: Synthetic polynucleotide"
gcctccctcgcgccatcagttcggaacacgtgtgtggcagtagcagaaaacaaaggccctagagtggccattcttacctgaggagacggtgaccgtggtccctttgccccagacgtccatgtagtagtagtagtagtcgacttcggaacacgtgtgttcacttaaaaatgcgtagttgtgtgttcactgggcacagagctcagctgtaagaactgtttcttggatctggatatggactcttgagcagtgggttgtaatttgtgctcccttcacaacccatgcacctgatccactcctgtccatcttctaggggcaagcagatacaattctagcaggaaacactggttatgatggggaatccagagacagtgcaggtgaggagagggtctgcaaggagtctcaagccagaagtgtgctgagaaacatagttgttgatgttaacaggttctgggcaacacagttcggaacacgtgtgtctgagcgggctggcaaggc

SEQ ID NO: 2484 - DNA, 495 bp, Artificial Sequence
  source: /note="Description of Artificial Sequence: Synthetic polynucleotide"
gcctccctcgcgccatcagttcggaactccgtctaggcagtagcagaaaacaaaggccctagagtggccattcttacctgaggagacggtgaccgtggtccctttgccccagacgtccatgtagtagtagtagtagtcgacttcggaactccgtctatcagctctaaaatacatggctatgtgtttgttcctcacatagttcagctgtaagaagaactactttttggacatggatctggagatggtgactggactcttgagaagaggggagtaatttgtgctccctccatgacctatgcacccgatccactccagtacctcccatgggggcgctgatggatgcagctccagcaggaaacactggttgtgatggagaatgcagagatggcacaggtgagggagaggttctgtgaaggcttcaccaggccaagagtgcaccgagaaatacagttgttggcagttcggaactccgtctactgagcgggctggcaaggc

SEQ ID NO: 2485 - DNA, 495 bp, Artificial Sequence
  source: /note="Description of Artificial Sequence: Synthetic polynucleotide"
gcctccctcgcgccatcagttcggaacaagagctgggcagtagcagaaaacaaaggccctagagtggccattcttacctgaggagacggtgaccgtggtccctttgccccagacgtccatgtagtagtagtagtagtcgacttcggaacaagagctgtcattcaaaatgtgtagttgtgtgttcactgggcacagagctcagctgtaagaactgtttcttggatctggatatggactcttgagaagtgggatgtaatttttgctccctttacaacccatgaacctgatccactcctgtccatcttctaggggcaagcagatacaattctagcaggacacactggttatgatggggaatccagagacagtgcaggtgagggagagggtctgtgaggatgtctcaagccagaagtgcactggaaaacacagttgttgatgttaacagtttctggacaacacgttcggaacaagagctgctgagcgggctggcaaggc

SEQ ID NO: 2486 - DNA, 495 bp, Artificial Sequence
  source: /note="Description of Artificial Sequence: Synthetic polynucleotide"
gcctccctcgcgccatcagttcggaactatcgctcggcagtagcagaaaacaaaggccctagagtggccattcttacctgaggagacggtgaccgtggtccctttgccccagacgtccatgtagtagtagtagtagtcgacttcggaactatcgctctcagctctaaaatacatggctatgtgtttgttgctcacatagttcacctgtaagaagaagtactttttggacatggatctggagatggtgactggactcttgagaagaggggagtaatctgtgctccctccatgacctatgcacccgatccactccagtacctcccatgggggcgctgatggatgcagctccagaaggaaacactggttgtgatggagaatgcagagatggcacaggtgagggagaggttctgtgaaggcttcaccaggccaagagtgcaccgagaaatacagttgttggcagttcggaactatcgctcctgagcgggctggcaaggc

SEQ ID NO: 2487 - DNA, 495 bp, Artificial Sequence
  source: /note="Description of Artificial Sequence: Synthetic polynucleotide"
gcctccctcgcgccatcagttcggaactcagatgcggcagtagcagaaaacaaaggccctagagtggccattcttacctgaggagacggtgaccgtggtccctttgccccagacgtccatgtagtagtagtagtagtcgacttcggaactcagatgctcatgaaagaagaattcatgtgcagacacatctgcttgtctgaagatatagtgcatgtgggaacatgtgggcttgtctgaattcatgataagtgggctggaattcatcctccactcatcacgtatgcacctgacccactcctgtgctttccatccagtgcctacaggaagcactgattgtgacagagaatccagaggcagcacaggtgagtgagggggtttgcaagggcttcaccaggctgataattgactgagaaaaacagttgttagcatgcacaagttctggatgatacattggaaacccttcggaactcagatgcctgagcgggctggcaaggc

SEQ ID NO: 2488 - DNA, 495 bp, Artificial Sequence
  source: /note="Description of Artificial Sequence: Synthetic polynucleotide"
gcctccctcgcgccatcagttcggaacgtgtagcaggcagtagcagaaaacaaaggccctagagtggccattcttacctgaggagacggtgaccgtggtccctttgccccagacgtccatgtagtagtagtagtagtcgacttcggaacgtgtagcatcaacagtaatacaaaccatgtcctcagatgtcacagagctcaggtatagtcaaaattgtttcttggatgaatctctggagaaggagagttggctctgcagagatggatcatcgtgtgtgtcacccttgcaatgtgttcctgacagcccatggaagcgggctagtggattcagctccagcagtaactgttggttgggatggacaacccagaaatggggcatgtgaggaagagaaaatgaaagtggatagcctgttaccgaaaactgctggactaagacacttgtaagcctgtcaatctcagtgttcggaacgtgtagcactgagcgggctggcaaggc

SEQ ID NO: 2489 - DNA, 495 bp, Artificial Sequence
  source: /note="Description of Artificial Sequence: Synthetic polynucleotide"
gcctccctcgcgccatcagttcggaactggcagttggcagtagcagaaaacaaaggccctagagtggccattcttacctgaggagacggtgaccgtggtccctttgccccagacgtccatgtagtagtagtagtagtcgacttcggaactggcagtttcacagccaagatatggaaactaagtgtctgtcaatgggcaaatggataaagacaatgtggtatgtgtacacaacatagcattattatgccttataaaataaggaaatgctgccattttccacaagacaaatggactcccaccaccactagcaatggattttatccattgcagcccctccctgagagccggcagatccaggtccactagtaaggactggttgtgacggagtggccagtaacagtgtaggtgaggcagagggtaagtgtgtgctattcaggtccagggctgactcctgcagctgttcggaactggcagttctgagcgggctggcaaggc

SEQ ID NO: 2490 - DNA, 495 bp, Artificial Sequence
  source: /note="Description of Artificial Sequence: Synthetic polynucleotide"
gcctccctcgcgccatcagttcggaaccagtccaaggcagtagcagaaaacaaaggccctagagtggccattcttacctgaggagacggtgaccgtggtccctttgccccagacgtccatgtagtagtagtagtagtcgacttcggaaccagtccaatcagtgtaaaaattcatggttgtgtactcgttgctcaggtagctcagctgtagaagaaactgtgttttggatgtggatctggagatggtgactggactcttgaggcgtgggttgcgttgtgttctccctcatgacctgtgcacctgattcactccagtcccttccctggggagctgagggatccagctccagcaggaagcactggttgtgatggagaagcagagacagcacagatgagggagagggtctgtgagggcttcgccaggccaagaacgcacgagaaatacagatgtcggcatgcacttcggaaccagtccaactgagcgggctggcaaggc

SEQ ID NO: 2491 - DNA, 495 bp, Artificial Sequence
  source: /note="Description of Artificial Sequence: Synthetic polynucleotide"
gcctccctcgcgccatcagttcggaacgtgtctacggcagtagcagaaaacaaaggccctagagtggccattcttacctgaggagacggtgaccgtggtccctttgccccagacgtccatgtagtagtagtagtagtcgacttcggaacgtgtctactcaagtaatacaaggttgtggcattgttggtcacagaactcagctaaaagaaaatttggttcttggacgtggatctggagatggtgactgagctcatgaggagtgggttagaatttgtgctccctcgtgacctatgccctgatccactcccttgactgaggactggcggatccagctccagcaggaagcactagttgtgatggagaatccagagacagcacaggtgagggagggggtctgtgagggcctcaccaggccaataaatgaccatgaaacacagtggttggtgtgcatggcttctggttcggaacgtgtctacctgagcgggctggcaaggc

SEQ ID NO: 2492 - DNA, 495 bp, Artificial Sequence
  source: /note="Description of Artificial Sequence: Synthetic polynucleotide"
gcctccctcgcgccatcagttcggaacgtacagtgggcagtagcagaaaacaaaggccctagagtggccattcttacctgaggagacggtgaccgtggtccctttgccccagacgtccatgtagtagtagtagtagtcgacttcggaacgtacagtgtcataaaaatacatggctgtgtgcttgtgactcacttagctcggctgtaggaagaactgctttttggacatggatctggagatggtgactggactcttgaggagtgggttggaatgtgcactccctcatgacctgtgcactggattcactccagtcccttcctggggggtttatgaatgcagctacagcaggaagcactggttgtgatggggaatccagagacagcacaggtgagggagagggtctgtgagggcttcaccaggccaagtgggcactgagaaacacagttgttggcatgcacagttcggaacgtacagtgctgagcgggctggcaaggc

SEQ ID NO: 2493 - DNA, 495 bp, Artificial Sequence
  source: /note="Description of Artificial Sequence: Synthetic polynucleotide"
gcctccctcgcgccatcagttcggaacggatcatcggcagtagcagaaaacaaaggccctagagtggccattcttacctgaggagacggtgaccgtggtccctttgccccagacgtccatgtagtagtagtagtagtcgacttcggaacggatcatctcatttaaaacatggctgtgagcttgttgctcacatagctccactgtaaaaacaagtgttttttggacccgaatttggagatggtgactggattcataaggagtgggtgggaatttttgctcccttcatgacgtgtgcgcctggtccactccagtccttcccatgtggactcgtggatccagctccagcaggaaacactggttgtgatggaaaatccagagacagcacaggtgagggagagggtctgcgagggctccaccaggccaagagtgcactaagaaacacagttgtttgtgagcacagttcggaacggatcatcctgagcgggctggcaaggc

SEQ ID NO: 2494 - DNA, 495 bp, Artificial Sequence
  source: /note="Description of Artificial Sequence: Synthetic polynucleotide"
gcctccctcgcgccatcagttcggaactattggcgggcagtagcagaaaacaaaggccctagagtggccattcttacctgaggagacggtgaccgtggtccctttgccccagacgtccatgtagtagtagtagtagtcgacttcggaactattggcgtcatgaaaaatatatggctatgtgattgttgctcatgtagctcagctgtaggaagaactgtttttggacatggatctggggatggtgactggactcttgaggaaaggggagtaatgtgtgctcccttcatcatctatggacccaatccactccattccctcccagagagggggtgatggatgcagatccaggaggaagcactggttgtgatggagaatgcagagatgacacacatgagggagagggtctttgggggcttcaccaggccaagagtgcaccgagaaacacagttgttggcaggcattcggaactattggcgctgagcgggctggcaaggc

SEQ ID NO: 2495 - DNA, 495 bp, Artificial Sequence
  source: /note="Description of Artificial Sequence: Synthetic polynucleotide"
gcctccctcgcgccatcagttcggaacaggcttgaggcagtagcagaaaacaaaggccctagagtggccattcttacctgaggagacggtgaccgtggtccctttgccccagacgtccatgtagtagtagtagtagtcgacttcggaacaggcttgatcaattaaaattcatggttgtgtacttgttgctcaggtagctcagctacaggaaacactgttttttggatgtggatctggagatagtgactggactcttgaggagtgggttggaatgtgcactccctcatgacctgtgcacctgattcgctccagtcccttccttgcggggggtgatggatgcagctccagcaggaagcactggttgtgatggagaatgcagagacagcacaggtgagagagagggtctgtgagagcttcactagcccaagagtgcaggagaaacacagttgttggcatgcacttcggaacaggcttgactgagcgggctggcaaggc

SEQ ID NO: 2496 - DNA, 495 bp, Artificial Sequence
  source: /note="Description of Artificial Sequence: Synthetic polynucleotide"
gcctccctcgcgccatcagttcggaacacacacgtggcagtagcagaaaacaaaggccctagagtggccattcttacctgaggagacggtgaccgtggtccctttgccccagacgtccatgtagtagtagtagtagtcgacttcggaacacacacgttcagcttaaaaatacatggctatgtgcttgttgctcatgtagctcagctgtaggaagaactgcttttttggacacggatctggggatggtgactggacacttgaggagtgggtggtaatgtgtgctcccttcatgacctatgcacccaatccactccattcccttccctggggggctgatggatccagcttcagcaggaagacctcgttatcacggggaacacagacacagcgcaggtaagggagagggtctgtgagggcttcaccaggccaagagtgcgctgagaaacacagttgttggcatttcggaacacacacgtctgagcgggctggcaaggc

SEQ ID NO: 2497 - DNA, 495 bp, Artificial Sequence
  source: /note="Description of Artificial Sequence: Synthetic polynucleotide"
gcctccctcgcgccatcagttcggaactagacggaggcagtagcagaaaacaaaggccctagagtggccattcttacctgaggagacggtgaccgtggtccctttgccccagacgtccatgtagtagtagtagtagtcgacttcggaactagacggatcaagtaatacatgaccttgtccttggctttcagattggtcattgtaaggcagactgcacttaaaagggtgttgcttgagattgttaatttatttgtactcatggaaagtaaccctgagaattcatacttgatcactcactgttggcacccacacctatccctgttgtgaagcgtgctggaccaagctcatgctgtaaccagtaaaggtgaaaccagaggctttgcaggagagtctcaccactgggctgtaaattttttccccctctgactccatcagtaaacttcacacaggacttccgtgattcggaactagacggactgagcgggctggcaaggc

SEQ ID NO: 2498 - DNA, 495 bp, Artificial Sequence
  source: /note="Description of Artificial Sequence: Synthetic polynucleotide"
gcctccctcgcgccatcagttcggaacgagcgataggcagtagcagaaaacaaaggccctagagtggccattcttacctgaggagacggtgaccgtggtccctttgccccagacgtccatgtagtagtagtagtagtcgacttcggaacgagcgatatcaagtaatacactgcctactcctcagctttccagtagataattttaagggagattgtgatgttaagtgttgtccccaggaactgtgaatcttctttgtgctggagcagagcaccactgagaacttccacttgggtcactcatggctaccacccactccagcccctctcctccagccatcagggcccaataaatgctgcagtcagtgaaggtgaatcttgatgctttgcagaagaagctaagagaatagccaggctattttgccaaagacaaaaatatagatccagtaaacctttgtggttttttcggaacgagcgatactgagcgggctggcaaggc

SEQ ID NO: 2499 - DNA, 495 bp, Artificial Sequence
  source: /note="Description of Artificial Sequence: Synthetic polynucleotide"
gcctccctcgcgccatcagttcggaacgcatctgaggcagtagcagaaaacaaaggccctagagtggccattcttacctgaggagacggtgaccgtggtccctttgccccagacgtccatgtagtagtagtagtagtcgacttcggaacgcatctgatcaagtaatacacggacttttcctgagctctcaggttaatcatcttaaaagagaatctcctgaactgagtgtatttgaggattgttaatcatctttttactcaaggagagtcccactgagaacttctatttgaattattgttattacccacacccacccctgtcatgaagcctgctggatcaagcttatgctgttttcagtgaaagtgaatccagaggctttgcagaaaaggcagaattcctggtctgtagtatttctctgtctaactccattagttaacttcacaggggacttctgaaaacattcggaacgcatctgactgagcgggctggcaaggc

SEQ ID NO: 2500 - DNA, 495 bp, Artificial Sequence
  source: /note="Description of Artificial Sequence: Synthetic polynucleotide"
gcctccctcgcgccatcagttcggaactgctacacggcagtagcagaaaacaaaggccctagagtggccattcttacctgaggagacggtgaccgtggtccctttgccccagacgtccatgtagtagtagtagtagtcgacttcggaactgctacactcaagtattacaaggccttgtccttgactttcagtttggtccctttaaggtagactgcacatgaaaaggtgtcgcttgggactgttaatttatttgtactcatggagagtaactctgagaactcccacttgatcactcactgtttccacccacaccaatccctgtcatgaagcctgctggaccaagctcatgctgtagccagtaaaggtgaaatcagaggctttgcatgagagtctcagtgaaccactgggctgtacaattttcccccctgactctatcagtaaatttcacacaggacttctgttcggaactgctacacctgagcgggctggcaaggc

SEQ ID NO: 2501 - DNA, 495 bp, Artificial Sequence
  source: /note="Description of Artificial Sequence: Synthetic polynucleotide"
gcctccctcgcgccatcagttcggaacaactgccaggcagtagcagaaaacaaaggccctagagtggccattcttacctgaggagacggtgaccgtggtccctttgccccagacgtccatgtagtagtagtagtagtcgacttcggaacaactgccatcactgtaatatacggccttgcccttggctttcaggttggtccttgtaaggtagactgcacttgaaagggtgtcacttgggaatgttgatttatctgtactcatggagagtaacccttagaactcccatatgatctctcactgttgctacccacaccaattcctgttgtgaagcgtgctggaccaagctcatgctgcacccagtaaacccgaaaccagaggctttgcaggacagtctcagtgaactgctgggctgttaaatttttctccttctgactccatcagtaaacatcacacaggacttttcggaacaactgccactgagcgggctggcaaggc

SEQ ID NO: 2502 - DNA, 495 bp, Artificial Sequence
  source: /note="Description of Artificial Sequence: Synthetic polynucleotide"
gcctccctcgcgccatcagttcggaacttggactgggcagtagcagaaaacaaaggccctagagtggccattcttacctgaggagacggtgaccgtggtccctttgccccagacgtccatgtagtagtagtagtagtcgacttcggaacttggactgtcaagtaatacacagacttgtcttgggctctcagttttattatcttaaaagagaatcttctgaacagtgtctctgaggactgttaatcttctttgtactgaaggcgagtcccattgagaacttccacttgaattactgttatctccctcaccaacacttgccatgaatcctgctggaccaaacttgttcttttttcagtgaatccaggggctttgcagaacagtctgagaattcttggtctgtagtattttcctgtctgactccactagttaacttcacagaggacttctgcacacacagaggttcggaacttggactgctgagcgggctggcaaggc

SEQ ID NO: 2503 - DNA, 495 bp, Artificial Sequence
  source: /note="Description of Artificial Sequence: Synthetic polynucleotide"
gcctccctcgcgccatcagttcggaactcggtactggcagtagcagaaaacaaaggccctagagtggccattcttacctgaggagacggtgaccgtggtccctttgccccagacgtccatgtagtagtagtagtagtcgacttcggaactcggtacttcacagtaataaacggaattttcctgagctctcaggttaatcatcttaagagagaatcatctgaaaagcgtgtctctgaggactgttaatcttctttgtactcaaggagagtcccactgagaacttccacttgaattactgatgttatcacctacacccacccctgtcatgaagcctgctggaccaagcttatgctgttttcagtgaaagtgaatccacagggtttccagaaaagtctgagaattcttggtctgtagtatttctctgagagactccagtaattaacttcacaggggacctctgttcggaactcggtactctgagcgggctggcaaggc

SEQ ID NO: 2504 - DNA, 495 bp, Artificial Sequence
  source: /note="Description of Artificial Sequence: Synthetic polynucleotide"
gcctccctcgcgccatcagttcggaacccatggatggcagtagcagaaaacaaaggccctagagtggccattcttacctgaggagacggtgaccgtggtccctttgccccagacgtccatgtagtagtagtagtagtcgacttcggaacccatggattcacacagttaaatgctgccatgttctgggttctcaggctgttcatttgcatgtacagcatgtacttggtgttgtctctggaagtggtgagtctgcccctaacatagtctgcattgtattgatgactttcactacgccatataactgcaacccattccagccccttccctgaggcctggcaaacccagtgaatctcatagatactgaaggtgaaccaagaggctgcacaggagagcctcaggggcccctctcagtgtaccaagtctcccccagactctgtaagctgggcctcaccctggatacttcggaacccatggatctgagcgggctggcaaggc

SEQ ID NO: 2505 - DNA, 495 bp, Artificial Sequence
  source: /note="Description of Artificial Sequence: Synthetic polynucleotide"
gcctccctcgcgccatcagttcggaacacgaagatggcagtagcagaaaacaaaggccctagagtggccattcttacctgaggagacggtgaccgtggtccctttgccccagacgtccatgtagtagtagtagtagtcgacttcggaacacgaagattcacagtaatacactgcctacccctgtgagagccccctcagcttccaagtagattattttaagggagactgtgctggtaattggtgtccctgggaattgtgaatcttcattatgctgatgcagaatatcactgagaacttccacttgaatcaatcactgttaccacccactccagcctctgtcccccagccatctgggctcaatttatgctgtagtcagtgaaggtgaatcttgatgctttgcaaaagaggctaagagaacagccaggctgttttgccaaagataaaaatatagatccagtaattcggaacacgaagatctgagcgggctggcaaggc

SEQ ID NO: 2506 - DNA, 495 bp, Artificial Sequence
  source: /note="Description of Artificial Sequence: Synthetic polynucleotide"
gcctccctcgcgccatcagttcggaacactgtggaggcagtagcagaaaacaaaggccctagagtggccattcttacctgaggagacggtgaccgtggtccctttgccccagacgtccatgtagtagtagtagtagtcgacttcggaacactgtggatcaacagtattacacaaccttgtccttggctttcaggttagtcattgtaaggtagagtgcacgtgaaagggtgtcgctggaccagttaatttatttgtactcatgaagagtaaacctgagcactcccacttgttgactcactgttgccagccaccacaatccctgttgtgaagcctgctggaccaacctcaggctgttgccagaaaaggtgaatccagacgctttgcaagaaagtctcagtgaaccactgggctgtactacgtttacccctctgactccaccactgaacttcatacaggacttttcggaacactgtggactgagcgggctggcaaggc

SEQ ID NO: 2507 - DNA, 495 bp, Artificial Sequence
  source: /note="Description of Artificial Sequence: Synthetic polynucleotide"
gcctccctcgcgccatcagttcggaacggtgtcatggcagtagcagaaaacaaaggccctagagtggccattcttacctgaggagacggtgaccgtggtccctttgccccagacgtccatgtagtagtagtagtagtcgacttcggaacggtgtcattcaagtaatacatggccttctcctcggctctcaggttggtcattttgagggagactgtgctgacaagggtgtccctgaggattatgatttttctttgtattgatggagggtaccactaacaaattccacttgaatccctcgcttttgcctcccacaccaacccctgtcctgaagcctgctgggctgagctcatgctagagtcaatgaaggtaaattcagaggctttgtaaaaaaggctctgagaacagttaggctgtatcatttctcttccagattccaccagtgaacttcttgtaggactctttcggaacggtgtcatctgagcgggctggcaaggc

SEQ ID NO: 2508 - DNA, 495 bp, Artificial Sequence
  source: /note="Description of Artificial Sequence: Synthetic polynucleotide"
gcctccctcgcgccatcagttcggaactcgtgaagggcagtagcagaaaacaaaggccctagagtggccattcttacctgaggagacggtgaccgtggtccctttgccccagacgtccatgtagtagtagtagtagtcgacttcggaactcgtgaagtcacagtaatacaaggtcttgtccttggctttcacattggtcattttaaggtagactgcacttgaaagggtgttgcttgggactgttaatttacttgtactcatggagagtaaccctgataactcactgttgccacccacacaaatccctgtcatgaagcctgctggaccaagctcatgctgtagccagtacaagtgaaatcagaggctttgcaggagagtctgtgagaaccgctgggctgtacaatgtttccccctctgactccatcagtaagcttcaacaggacttacatgaacacagaggttcggaactcgtgaagctgagcgggctggcaaggc

SEQ ID NO: 2509 - DNA, 495 bp, Artificial Sequence
  source: /note="Description of Artificial Sequence: Synthetic polynucleotide"
gcctccctcgcgccatcagttcggaaccactagctggcagtagcagaaaacaaaggccctagagtggccattcttacctgaggagacggtgaccgtggtccctttgccccagacgtccatgtagtagtagtagtagtcgacttcggaaccactagcttcacacagtaatacacgcctgcatccccagccatcacacttctcagctgtaagttttcttgttttttactatgtgtttctggagatgctagctctgccctgaaggttggggcttagtgtttcccttaacccatatcacaccaacacactgaagaccttttgatgggagatggtggatccaggaaacagaatgttcagaaattgaatgtgcataggcggcataggtgaggctgagcatgaccaaggggaccactacttcttcctcccattgcacaaggtggtcctcactgtgaacccctgagaattcggaaccactagctctgagcgggctggcaaggc

SEQ ID NO: 2510 - DNA, 495 bp, Artificial Sequence
  source: /note="Description of Artificial Sequence: Synthetic polynucleotide"
gcctccctcgcgccatcagttcggaacggtcaactggcagtagcagaaaacaaaggccctagagtggccattcttacctgaggagacggtgaccgtggtccctttgccccagacgtccatgtagtagtagtagtagtcgacttcggaacggtcaacttcagcacagtagtacacatctatgtcctcagatctctgactgctcagctccatgtaggctgtgctcgtggacgtgtccctggtcatggtgactctgccctgaaacttctgtgcatagcctgtgttaccattgccagagtagctccctaccatccattcaaacccttatccaggggcctgtcacacacagtgaatgtcgtagctggcgaaggtgtatccagagctttgcaggagaccttcactgaggccatggacgctggcaacaggagagtcatcagaagctgggtgagtcatataatcaggattcggaacggtcaactctgagcgggctggcaaggc

SEQ ID NO: 2511 - DNA, 495 bp, Artificial Sequence
  source: /note="Description of Artificial Sequence: Synthetic polynucleotide"
gcctccctcgcgccatcagttcggaactacgtacgggcagtagcagaaaacaaaggccctagagtggccattcttacctgaggagacggtgaccgtggtccctttgccccagacgtccatgtagtagtagtagtagtcgacttcggaactacgtacgtcaacaggaatacacgaccatgtcttcagatctcaggctgctcagctccatgtaggctgtgctcacggacctgtcactggtaatggtgactctgccccggaacttctgtgcgtagtgtgtgttatcattgtaagggttgatgcatcccaaccactatgcccttgtccagggccctgtcgcacccactgtgtaaagtatttggtgaaggtgtatctggaagcctggccaggagaccttcactgaggacgcaggcttcttcacctcagccccaggctgcaacagctgaacctgggaatggacatcttcggaactacgtacgctgagcgggctggcaaggc

SEQ ID NO: 2512 - DNA, 495 bp, Artificial Sequence
  source: /note="Description of Artificial Sequence: Synthetic polynucleotide"
gcctccctcgcgccatcagttcggaacatgacaccggcagtagcagaaaacaaaggccctagagtggccattcttacctgaggagacggtgaccgtggtccctttgccccagacgtccatgtagtagtagtagtagtcgacttcggaacatgacacctcacacagtaatacatggccgtgtcttcagatctcaggctgctcagctccatgtaggctgtgctcgtggatgtgtccctggtcatggtgactctgccctggaacttctctgcgtagcttatgctgccatcactagggcacatccttcccatccactcaagcccttgtgcatgggcctggcgcacctagtgcatagagtaactggtgaaggtaggtgtatccacaagtcttgcaggagactttcactgatgccccagccttcttcatctcatccccagactgcaccagctgcacctgggactggttcggaacatgacaccctgagcgggctggcaaggc

SEQ ID NO: 2513 - DNA, 495 bp, Artificial Sequence
  source: /note="Description of Artificial Sequence: Synthetic polynucleotide"
gcctccctcgcgccatcagttcggaaccttcacgaggcagtagcagaaaacaaaggccctagagtggccattcttacctgaggagacggtgaccgtggtccctttgccccagacgtccatgtagtagtagtagtagtcgacttcggaaccttcacgatcacccagtaatacacagccgagtcctcagatctcaggctgctcagctctatgtaggctgtcctcagggacatgtccctggtaatggtgactctgccctggaacttctttgcatagttggtgttaccattgtaaagtgtgatccatctcatcctttcaagcccttgtccaggggcctgttgcaaccagtgcaaggagcagcaagtgaaggtgtatccggaagccttgcaggagaccttcactgaggccccaggcttctttacctcagcctcagactgccccagctgcacctgggagcagacacttcggaaccttcacgactgagcgggctggcaaggc

SEQ ID NO: 2514 - DNA, 495 bp, Artificial Sequence
  source: /note="Description of Artificial Sequence: Synthetic polynucleotide"
gcctccctcgcgccatcagttcggaacagaatcagggcagtagcagaaaacaaaggccctagagtggccattcttacctgaggagacggtgaccgtggtccctttgccccagacgtccatgtagtagtagtagtagtcgacttcggaacagaatcagtcacacagtaatacacgaccatgtcttcagatctcaggctgctcagctccatgtaggctgtgctcatggacctgtcactggtaatggtgactctgccccagaacgtctgtgcatagtgtgtgttatcattgtaagggttgattcatcccatccactatgcccttgtccagggctttgtcacacccaccgtgtaaagtatttggtgaaggtgtatctggaagcctggcaggagaccttcactgaggacccaggcttcttcacctcagccccaggctgcaacagctgaacctgggaatggacaccttcggaacagaatcagctgagcgggctggcaaggc

SEQ ID NO: 2515 - DNA, 495 bp, Artificial Sequence
  source: /note="Description of Artificial Sequence: Synthetic polynucleotide"
gcctccctcgcgccatcagttcggaacagttatgcggcagtagcagaaaacaaaggccctagagtggccattcttacctgaggagacggtgaccgtggtccctttgccccagacgtccatgtagtagtagtagtagtcgacttcggaacagttatgctcatgcacagtaatgtgtggctgtgtccacaatgtccatgttgatcactgttagaaccacttcattcttggaggtgtccttggagataatgagcctactcttcagagatgggctgtagtatttattatcattctaataaatgtgtgcaagccactccagggcctttgctgagggctgacagatctaacccacacccattccagaagtgctgagtgagaacccagagaaggtgcaggtcagcatgagggtctgtgtgggtttcaccagtgcaggaccagactccttcaaggtgacctgggataattcggaacagttatgcctgagcgggctggcaaggc

SEQ ID NO: 2516 - DNA, 495 bp, Artificial Sequence
  source: /note="Description of Artificial Sequence: Synthetic polynucleotide"
gcctccctcgcgccatcagttcggaacaggtctcaggcagtagcagaaaacaaaggccctagagtggccattcttacctgaggagacggtgaccgtggtccctttgccccagacgtccatgtagtagtagtagtagtcgacttcggaacaggtctcatcacagagtcatatgcagctgcatcctctgccctcagtctgttcatttgcagatacagtgagtttttggtattgtctctggaaatggtgaatcggcccttcacagagtctgcgtagtacatggtactaccactaccactaataactgggacccactgcagacccttccctggagcctgggggacccagtgcgtgctatggctactgaaggtgaatccagaggctgcacaggagagtctcagggacacccaggctttgtcaagtttgctccagactctaccagctgcatctcacactggacaccttcggaacaggtctcactgagcgggctggcaaggc

SEQ ID NO: 2517 - DNA, 495 bp, Artificial Sequence
  source: /note="Description of Artificial Sequence: Synthetic polynucleotide"
gcctccctcgcgccatcagttcggaacgtcatagtggcagtagcagaaaacaaaggccctagagtggccattcttacctgaggagacggtgaccgtggtccctttgccccagacgtccatgtagtagtagtagtagtcgacttcggaacgtcatagttcacacagtaatacacagccatgtcctcgggcctcaggctgttcatttgctgatacaggaagttcctggaattgtctctggagatgatgaatcggcccttcacagagtctgcatagtgcgtcctactgccattccaactaacacccgatacccactccagcccctttcctggagcctggcggacccagttcatgtcactgttactgaaggtgaatccagaggctgcacaggagagtctcagggaccccccaggctctaccaagcctcccccagactccaccagctgcactgttgtacccaggtttcggaacgtcatagtctgagcgggctggcaaggc

SEQ ID NO: 2518 - DNA, 495 bp, Artificial Sequence
  source: /note="Description of Artificial Sequence: Synthetic polynucleotide"
gcctccctcgcgccatcagttcggaacgtgacttgggcagtagcagaaaacaaaggccctagagtggccattcttacctgaggagacggtgaccgtggtccctttgccccagacgtccatgtagtagtagtagtagtcgacttcggaacgtgacttgtcaacagtaatacacggccgtgtcctcggttttcaggctcttcatttgcagataggtgatgcttttggaatcatctcttgagattgtgaatctgcctttcacagacgtggtctattctgttgtcccaccattagctttgtttctaatgaaacctacccattccagccccttcccgggagcctggcggaccccgctcatgtagtagtaactgaaggtgaatccagaggctgcacaggagagtctcagggaccccccaggctgtaccaagcctcccccagactccaccagctgcacctcacactgttcggaacgtgacttgctgagcgggctggcaaggc

SEQ ID NO: 2519 - DNA, 495 bp, Artificial Sequence
  source: /note="Description of Artificial Sequence: Synthetic polynucleotide"
gcctccctcgcgccatcagttcggaacgattgcagggcagtagcagaaaacaaaggccctagagtggccattcttacctgaggagacggtgaccgtggtccctttgccccagacgtccatgtagtagtagtagtagtcgacttcggaacgattgcagtcaacactaatagagggccgtgtcctcggttttcaggctgttcatttgcagatgaagtgtgttcttggcgttatctctggaggtattgaatcggtccttaccggagtctatgaggtatgtgctacccccattaggattaacttgtcaaaccaactccagcccattccctggagcctggcggacacagttcatgtagtagctactgaaggtgaattgagaggctgcacaggagagtctcggggaccacgcaggctttgccaagcctcccccagactccaccagctgcatctcacactggataccttcggaacgattgcagctgagcgggctggcaaggc

SEQ ID NO: 2520 - DNA, 495 bp, Artificial Sequence
  source: /note="Description of Artificial Sequence: Synthetic polynucleotide"
gcctccctcgcgccatcagttcggaacactatgacggcagtagcagaaaacaaaggccctagagtggccattcttacctgaggagacggtgaccgtggtccctttgccccagacgtccatgtagtagtagtagtagtcgacttcggaacactatgactcatgtacagccatacacagccatgtcctcagttctctgactgttcatttgcagatacagagagttcttagcattgtctttggagatggagaatctgcccttcacagagtctgcatggtgtatctgacttccatcatcttttatatctattactcactccagccccttgcctgcagactggtgaactgggctcattcagaagctactgaaggcgaatctagaggctacacaggagagtctcaggaacttcccaggttgtctcaggtcctctgtgggctctatcagctccacctcacactgaacttcggaacactatgacctgagcgggctggcaaggc

SEQ ID NO: 2521 - DNA, 495 bp, Artificial Sequence
  source: /note="Description of Artificial Sequence: Synthetic polynucleotide"
gcctccctcgcgccatcagttcggaacatggtcaaggcagtagcagaaaacaaaggccctagagtggccattcttacctgaggagacggtgaccgtggtccctttgccccagacgtccatgtagtagtagtagtagtcgacttcggaacatggtcaatcacatacagtaacacacagctgtgcccgctgctctcagactgttcattagcaaatacagtgagttcttggcattttctttggagatggtgaatttgctcttcaaagattatgcataacatatctgacttccatcacactgtatatctactactcactccagccccttccctggagcctgggaaaccgagttccttcagtagctactgaaggttaatccagagtctgcacaggagagtctcagggatcccccaggttgtcttgggtcctctccggactccacgagctgtacctctcactagacttcggaacatggtcaactgagcgggctggcaaggc

SEQ ID NO: 2522 - DNA, 495 bp, Artificial Sequence
  source: /note="Description of Artificial Sequence: Synthetic polynucleotide"
gcctccctcgcgccatcagttcggaacgatggcttggcagtagcagaaaacaaaggccctagagtggccattcttacctgaggagacggtgaccgtggtccctttgccccagacgtccatgtagtagtagtagtagtcgacttcggaacgatggctttcatgtatagccatacacggccacgtcctcagctctctgagtgttcatttgcagatacagagagttcttagcattgtctttggagatggagaatctgcccttcacagagtctgcatggtgtatctgacttccatcatcttttatatctattactcactccagccccttgcctggagactggtgaactcggctcattcagaagctactgaaggcgaatctagaggctacacaggagagtctcaggaacttcccaggttgtctcaggtcctctatggactctatcagctccacctcacactgaacttcggaacgatggcttctgagcgggctggcaaggc

SEQ ID NO: 2523 - DNA, 495 bp, Artificial Sequence
  source: /note="Description of Artificial Sequence: Synthetic polynucleotide"
gcctccctcgcgccatcagttcggaacagcatatgggcagtagcagaaaacaaaggccctagagtggccattcttacctgaggagacggtgaccgtggtccctttgccccagacgtccatgtagtagtagtagtagtcgacttcggaacagcatatgtcacatacagtaacacacagctgtgccctctgctctcagactgttcatttgcaaatacagtgagttcttggcattttctttggagatggtgaatttgctcttcacagattgggcataacatatctgacttccatcacactgtatatctactactcactccagccccttccctggagcctgggaaaccgagctcattcagtagctactgaaggttaatccagagtctgcacaggagagtctcaaggatcccccaggttgtcttgggtcctctccggactccacgagctgtacctctcactagacttcggaacagcatatgctgagcgggctggcaaggc

SEQ ID NO: 2524 - DNA, 495 bp, Artificial Sequence
  source: /note="Description of Artificial Sequence: Synthetic polynucleotide"
gcctccctcgcgccatcagttcggaaccatatgctggcagtagcagaaaacaaaggccctagagtggccattcttacctgaggagacggtgaccgtggtccctttgccccagacgtccatgtagtagtagtagtagtcgacttcggaaccatatgcttcaagtaatacacagacctatcctcggctctgacgctgttcatttgcagatacagtgatttcttggcatcatctctggagagggtgaatcgacccttcacagagtctgcatagcttgtgctacctacacaacaactcataaatgagacctactccagccctttcccaggagcctgatggacccagctcatccagtacctaataaaggtactaaaggtgaatccagaggctgcaaaagaaagtctcagggacccccaggctataacaagcctcccaaagactccaccagctgcacctcacactgttcggaaccatatgctctgagcgggctggcaaggc

SEQ ID NO: 2525 - DNA, 495 bp, Artificial Sequence
  source: /note="Description of Artificial Sequence: Synthetic polynucleotide"
gcctccctcgcgccatcagttcggaactcgtcgatggcagtagcagaaaacaaaggccctagagtggccattcttacctgaggagacggtgaccgtggtccctttgccccagacgtccatgtagtagtagtagtagtcgacttcggaactcgtcgattcaacacagccgagtcctcatctctcagactgttcatttgcaagtacagcatgttcttgccattgtctctagagatggtgaatctacccttcagtgtctgcatagtataggctaccaccactagcactaatgtatgagacccattccagcccctttcttgaagcccggtgggcccagttcatgtcattgcttctcaagatgaatccgcaggctgcacatgagagtctcaggacacccccaaccccaccacagctgtaccaagtctcccccagactctaccagctgcacctcatactgcacaccttcggaactcgtcgatctgagcgggctggcaaggc

SEQ ID NO: 2526 - DNA, 495 bp, Artificial Sequence
  source: /note="Description of Artificial Sequence: Synthetic polynucleotide"
gcctccctcgcgccatcagttcggaaccagtctgtggcagtagcagaaaacaaaggccctagagtggccattcttacctgaggagacggtgaccgtggtccctttgccccagacgtccatgtagtagtagtagtagtcgacttcggaaccagtctgttcaagtaatacatggccgtgtccttagctttcagactgtccatttgcagatagagcatgctcttagaattgtctcggagattgtgaatcggcccttcacagagtctgcatagtatttctgacttccatcattccagatatgtgccactcactccagccccttccctggagcctggcggacccagctcatgccatagctactaaaggagaatcctgaggctgcacaggagagtctcagggaccccccaggctggaccaagcctcccccagactccaccagctgcacctcacactggacacctgcttcggaaccagtctgtctgagcgggctggcaaggc

SEQ ID NO: 2527 - DNA, 495 bp, Artificial Sequence
  source: /note="Description of Artificial Sequence: Synthetic polynucleotide"
gcctccctcgcgccatcagttcggaacaacgcgtaggcagtagcagaaaacaaaggccctagagtggccattcttacctgaggagacggtgaccgtggtccctttgccccagacgtccatgtagtagtagtagtagtcgacttcggaacaacgcgtatcagtacagtaatagatggccgtgtactcggttttcagggtattcacttgcagatacagtgtgttctttgaatcatctcttgagatggtgaacctgcctttcacagatgcagcgcattctgtcgtgtaactgttacgtttggttctaatacggccaacccactccagccctttcccagaagcctggcggatccagtgcattcagaagtcactgaaggtgaatctagaagctgcaaatgagagtctcggggacccacccaggctgtaccaagcctcccccagactccaccagctgcgcctcacgttcggaacaacgcgtactgagcgggctggcaaggc

SEQ ID NO: 2528 - DNA, 495 bp, Artificial Sequence
  source: /note="Description of Artificial Sequence: Synthetic polynucleotide"
gcctccctcgcgccatcagttcggaacgtagttcgggcagtagcagaaaacaaaggccctagagtggccattcttacctgaggagacggtgaccgtggtccctttgccccagacgtccatgtagtagtagtagtagtcgacttcggaacgtagttcgtcaacaataatacacagccatgtcctcagctatcaggctgttcatttgaagatacaaggacttcttggcgttgtctctggagatggtgaatcggcccatcacggagtctgcatagtatgtatcaccaccagtaccaatagctgatacccactccggacccttccctggagcccggcgaacccagtgcagaacatagctactgaaggcgaatccagaggctgcacaggagggtctcagggaccccccaggctgtaccaagcctcccccagactccaccagctgatcctcacactggacacctgcttcggaacgtagttcgctgagcgggctggcaaggc

SEQ ID NO: 2529 - DNA, 495 bp, Artificial Sequence
  source: /note="Description of Artificial Sequence: Synthetic polynucleotide"
gcctccctcgcgccatcagttcggaaccgaactacggcagtagcagaaaacaaaggccctagagtggccattcttacctgaggagacggtgaccgtggtccctttgccccagacgtccatgtagtagtagtagtagtcgacttcggaaccgaactactcatgactcaataatacagagccatattctcagctctcagactgttcatttgcagatacaacctgtgcttggcattgtctttggagatggtgaatctgaccttcacagagtctgcatattatgtctgacttccatcgtacattatatctactactcactgcagcccctttcctggagcctggcagattcagctgatctagtagctacagaaggtggattcagaggatgcacggcagagtctcaggcacattcagcttgtgccaactctccccaagactccaccatctgcaccccacactagacttcggaaccgaactacctgagcgggctggcaaggc

SEQ ID NO: 2530 - DNA, 495 bp, Artificial Sequence
  source: /note="Description of Artificial Sequence: Synthetic polynucleotide"
gcctccctcgcgccatcagttcggaacttaacgtcggcagtagcagaaaacaaaggccctagagtggccattcttacctgaggagacggtgaccgtggtccctttgccccagacgtccatgtagtagtagtagtagtcgacttcggaacttaacgtctcaacagtaatacacggtcatgtcctcagctctcaggctgttcacttgcagatagagggagttcttggcattgtctctggagatggtcaatcggcccttcacagagtctacatagtatttctcacttccgtcacactttatgtcggccacccactccagccccttctccggagcctggcagacccagtgcatccaggagctactgaaggtgaatccagaggctgcacaggagagtctcagggaccctccaggctgtaccaagcctcacccagactccaccagctgcacctcacactggacaccttcggaacttaacgtcctgagcgggctggcaaggc

SEQ ID NO: 2531 - DNA, 495 bp, Artificial Sequence
  source: /note="Description of Artificial Sequence: Synthetic polynucleotide"
gcctccctcgcgccatcagttcggaacagcaacctggcagtagcagaaaacaaaggccctagagtggccattcttacctgaggagacggtgaccgtggtccctttgccccagacgtccatgtagtagtagtagtagtcgacttcggaacagcaaccttcacatacagtaatacacggccgtgccctctgctctcagactgttcatttgcaaacagagtgagttcttggcattttctttggagatggtgaatctgctcttcacagattgtgcataacatagctgacttctatcctactatatatctactactcactccagccccttccctggagcctgggaatctgagctcattcagtagctactgaaggttaatccagagtctgcacaggagagtctcagggatcccccaagttgtctttggttttcttcagactccaccagctgtacctcacactggacttcggaacagcaacctctgagcgggctggcaaggc

SEQ ID NO: 2532 - DNA, 495 bp, Artificial Sequence
  source: /note="Description of Artificial Sequence: Synthetic polynucleotide"
gcctccctcgcgccatcagttcggaacttctcgagggcagtagcagaaaacaaaggccctagagtggccattcttacctgaggagacggtgaccgtggtccctttgccccagacgtccatgtagtagtagtagtagtcgacttcggaacttctcgagtcaacagtaatacacagccttgtccttggctttcaggttggtcattgtaaggtagactgcacatgaaaaggtgtcgcttgggactgttaatttatttgtactcatggagagtaactctgagaactcccacttgatcactcactgtttccacccacaccaatccctgtcatgaagcctgctggaccaagctcatgctgtagccagtaaaggtgaaatcagaggctttgcaggagagtctcagtgaaccactgggctgtacaattttctgcctctgactccatcaataaacttcacacaggacttttcggaacttctcgagctgagcgggctggcaaggc

SEQ ID NO: 2533 - DNA, 495 bp, Artificial Sequence
  source: /note="Description of Artificial Sequence: Synthetic polynucleotide"
gcctccctcgcgccatcagttcggaacactctacgggcagtagcagaaaacaaaggccctagagtggccattcttacctgaggagacggtgaccgtggtccctttgccccagacgtccatgtagtagtagtagtagtcgacttcggaacactctacgtcaacacagtaatacacagccatgtcgtcggctctcaggctgttcatttgcagatacagtgaattctgggcattgtctctagagatggtgaatcagcccttcacagagtctgtgtagagtacggtatcaccacttgtactaataactgagacccactccaaaccctttcctggagcctggtggacccagtgcatagcagagctactgaaggtgaatccagaggctgcacaggagagtctcagagaccctcccagtctttactaagcctcccccagactccaccagctgcacctcacactggacttcggaacactctacgctgagcgggctggcaaggc

SEQ ID NO: 2534 - DNA, 495 bp, Artificial Sequence
  source: /note="Description of Artificial Sequence: Synthetic polynucleotide"
gcctccctcgcgccatcagttcggaactaccggaaggcagtagcagaaaacaaaggccctagagtggccattcttacctgaggagacggtgaccgtggtccctttgccccagacgtccatgtagtagtagtagtagtcgacttcggaactaccggaatcaacagtagtacacaactgtgccctcggctctcaggctgttcatttgcagagacagtgaattctgggcattgtctctggagatggtgaatcggcccttcacagagtctgtgtagagtacggtatcaccacttgtactaataactgagacccactacaaaccctttcttggagcctggcggacccagtgcatagcagagctactgaaggtgaatccagaggctgcacaggagagtctcagggaccccccaggctggaccaagccttccccagactccaccagctgcacctcacactggacaccttcggaactaccggaactgagcgggctggcaaggc

SEQ ID NO: 2535 - DNA, 495 bp, Artificial Sequence
  source: /note="Description of Artificial Sequence: Synthetic polynucleotide"
gcctccctcgcgccatcagttcggaaccgaattgcggcagtagcagaaaacaaaggccctagagtggccattcttacctgaggagacggtgaccgtggtccctttgccccagacgtccatgtagtagtagtagtagtcgacttcggaaccgaattgctcatgtacagccatgcatggtcatgtcctcagctctcagactgttcgtttggagatacggtgagttcttagcattgtctttggagatggtgaatctgcccttcacagagtctgcatggtatatctgacttccatcatattttacatctattactccctccagccccttccctagagtctcattgacccagctcattcagtagctactgaaggtgaatccagaggctacacaggagagtctcaggaacttcccaagttgtctcaggccctctatggactctatcagctccacctcacactgaacttcggaaccgaattgcctgagcgggctggcaaggc

SEQ ID NO: 2536 - DNA, 495 bp, Artificial Sequence
  source: /note="Description of Artificial Sequence: Synthetic polynucleotide"
gcctccctcgcgccatcagttcggaacttcgctcaggcagtagcagaaaacaaaggccctagagtggccattcttacctgaggagacggtgaccgtggtccctttgccccagacgtccatgtagtagtagtagtagtcgacttcggaacttcgctcatcagtatagtaatacacggccgtgtcctcggttttcaggctgttcatttgcagataggcgatgcttttggaatcatcgcttgagatggtgaatctgcctttcacagacgcggcgtattctgttgttccacgattagttttgtttttagtgaaacctacccactccagcccctttcctggagcccggcagatccactgcatgcagtagttaacggaaggtgaatccagaggctgcacaggagagtctcagggaccccccaggctgtaccaagcctcccccagactccaccagctgcacctcacattcggaacttcgctcactgagcgggctggcaaggc

SEQ ID NO: 2537 - DNA, 495 bp, Artificial Sequence
  source: /note="Description of Artificial Sequence: Synthetic polynucleotide"
gcctccctcgcgccatcagttcggaacgacgttaaggcagtagcagaaaacaaaggccctagagtggccattcttacctgaggagacggtgaccgtggtccctttgccccagacgtccatgtagtagtagtagtagtcgacttcggaacgacgttaatcaacagtaatacacggccgtgtcctcggctctcaggctgttcatttgcagataggtgatgcttttggaatcatctcttgagattgtgaatctgcctttcacagacgtggtctattctgttgtcccaccattagctttgtttctaatgaaacctacccactccagccccttcccgggagcctggcggacccagctcatgtagtagtcactgaaggtgaatccagaggctgcacaggagagtctcagggaccccccaggctggaccaagcctcccccggactccaccagctgcacctcacactgttcggaacgacgttaactgagcgggctggcaaggc

SEQ ID NO: 2538 - DNA, 495 bp, Artificial Sequence
  source: /note="Description of Artificial Sequence: Synthetic polynucleotide"
gcctccctcgcgccatcagttcggaaccgtagagtggcagtagcagaaaacaaaggccctagagtggccattcttacctgaggagacggtgaccgtggtccctttgccccagacgtccatgtagtagtagtagtagtcgacttcggaaccgtagagttcacacagtaatacgtggctgtgtactcagctctcaaactgttcatttccagataagagtgtgttcttggcattgtttctggagatggggaatcagaacttcccagaatgtgcatagcgtatgctactcccatcagtactaatacatgagacccactccagtctgttccctggagcctggcaggcccagtgcatccagtggctactgaaggcaaatccagaggctgcacaggacagtctcagggacccccacccccaccgcgccaggctgtaccaagtctcccccaggctccaacaactgcgcttcggaaccgtagagtctgagcgggctggcaaggc

SEQ ID NO: 2539 - DNA, 495 bp, Artificial Sequence
  source: /note="Description of Artificial Sequence: Synthetic polynucleotide"
gcctccctcgcgccatcagttcggaacttccggtaggcagtagcagaaaacaaaggccctagagtggccattcttacctgaggagacggtgaccgtggtccctttgccccagacgtccatgtagtagtagtagtagtcgacttcggaacttccggtatcacagtaatagacggccatggtgtcagcaatgaaactgtttatttgcagatacagtgagttcttggtgttttctctggagatggtcaaccggcccttcacagagtctgagtagtatatgcctccaccactagcattaatgtaagacccactccagtcccttccctggagcttggtccacctagtgcatgccatagttactgaaagtgtatccagaggctgcacaggagagtcacatggaccccccaagctgtaccaagcctcccccagactctaccagctacacttcacattggacacctgcttcggaacttccggtactgagcgggctggcaaggc

SEQ ID NO: 2540 - DNA, 495 bp, Artificial Sequence
  source: /note="Description of Artificial Sequence: Synthetic polynucleotide"
gcctccctcgcgccatcagttcggaacgcaattcgggcagtagcagaaaacaaaggccctagagtggccattcttacctgaggagacggtgaccgtggtccctttgccccagacgtccatgtagtagtagtagtagtcgacttcggaacgcaattcgtcacatacagtaacacacagctgtgccctctgctctcagactgttcatttgcaaatacagtgagttcttggcattttctttggagacggtgaatctgctcgtcacagattgtgcataacatatctgacttccatcacactgtatatctactactcactccagccccttccctggagcctgggaaaccgagctcattcagtagctactgaaggttaatccagaggctgcacaggagagtctcagggaacccaggttgtcttgggtcctctccagactccaccagctgtacctcacactggacacttcggaacgcaattcgctgagcgggctggcaaggc

SEQ ID NO: 2541 - DNA, 495 bp, Artificial Sequence
  source: /note="Description of Artificial Sequence: Synthetic polynucleotide"
gcctccctcgcgccatcagttcggaactgagcgaaggcagtagcagaaaacaaaggccctagagtggccattcttacctgaggagacggtgaccgtggtccctttgccccagacgtccatgtagtagtagtagtagtcgacttcggaactgagcgaatcaacagtaatacacagccgtgtcctcggctctcaggctgttcatttgcagatacagtgagttcttggcgttgtctctggagatggtgaatcggcccttcacagagtctgcgtagtatatggtactactactactaatggatgagacccactccagccccttccctggagcctggcggacccagttcatgtagtagtcactgaaggtgaatccagaggctgcacaggagagtctcagggaccccccaggctttaccaagcctcccccagactccaccagctgcacctcacactggacacctgcttcggaactgagcgaactgagcgggctggcaaggc

SEQ ID NO: 2542 - DNA, 495 bp, Artificial Sequence
  source: /note="Description of Artificial Sequence: Synthetic polynucleotide"
gcctccctcgcgccatcagttcggaactactaagcggcagtagcagaaaacaaaggccctagagtggccattcttacctgaggagacggtgaccgtggtccctttgccccagacgtccatgtagtagtagtagtagtcgacttcggaactactaagctcaacagtaatacacggccgtgtccgcggcggtcacagagctcagcttcaggtagaactggttcttggacgtgtctacggacatggtgattcgactcttgagggacgggttgtagtaggtgctcccactatgatggatttccccaatccactccagccccttccctgggggctggcggacccagattcaccagttaccactgctgatggagtcaccagagacagcgcagatgagggacagggtctccgaaggcttcaccagtcctgggcccgactcctgcagctgcacctgggacaggaccccttcggaactactaagcctgagcgggctggcaaggc

SEQ ID NO: 2543 - DNA, 495 bp, Artificial Sequence
  source: /note="Description of Artificial Sequence: Synthetic polynucleotide"
gcctccctcgcgccatcagttcggaactggcgtatggcagtagcagaaaacaaaggccctagagtggccattcttacctgaggagacggtgaccgtggtccctttgccccagacgtccatgtagtagtagtagtagtcgacttcggaactggcgtattcactgcgcccgccccctccgcctccctgcggtcacagagctcagcttcagggaaaactggttcttggacgtttctattgacatggtgactcaactcctgagggacggggtgtagtagctcctcccactataatagatgtatccaatccattccagccccttccctggggactggcggaccagctccaccagttaccactgctgatggagtcaccagagacagcgcatgtgagggacagggtctccgaagcttcaccagtcctgggccccactcctgcagctgcactgggacaggacccctgtttcggaactggcgtatctgagcgggctggcaaggc

SEQ ID NO: 2544 - DNA, 495 bp, Artificial Sequence
  source: /note="Description of Artificial Sequence: Synthetic polynucleotide"
gcctccctcgcgccatcagttcggaacgataaccaggcagtagcagaaaacaaaggccctagagtggccattcttacctgaggagacggtgaccgtggtccctttgccccagacgtccatgtagtagtagtagtagtcgacttcggaacgataaccatcattagatggtccctctcacacaataatacatggcggcgtccgaggccttcaggctgctccactgcaggtaggcggtgctgctggagctgtcggctgagatggtgacgtggccttggaaggatgggctgtatctggtatcagagttcccaggatagatgctccccatccactccagttctttcccgggcatctggcgcacccagtggatccagtagctggtaaagctgtatccagaagtcttacaggagatcctcagagactccccgggtcttttcacctctgctgcagactgcaacagctgttcggaacgataaccactgagcgggctggcaaggc

SEQ ID NO: 2545 - DNA, 495 bp, Artificial Sequence
  source: /note="Description of Artificial Sequence: Synthetic polynucleotide"
gcctccctcgcgccatcagttcggaacctagtgaaggcagtagcagaaaacaaaggccctagagtggccattcttacctgaggagacggtgaccgtggtccctttgccccagacgtccatgtagtagtagtagtagtcgacttcggaacctagtgaatcagcacgtgtcctcagcctttaggctgctgatatgaagatatgccatgctgacggaggtgtccatggagaagacaaaccgtcctgtgaagccctgggcatacgttaggttcccagtgttggtgttgatccatcccatttcctcaagcccttgtccatgggcctgtcatacccagctgatagcatagcttgtgaaggtgtatccagaagccttgcaggaaaccttcaatgaggctccaggcttcttcacctcaggcccagactgcaccagctgcacctgtgagtggacacctgtggagaggagttcggaacctagtgaactgagcgggctggcaaggc

SEQ ID NO: 2546 - DNA, 495 bp, Artificial Sequence
  source: /note="Description of Artificial Sequence: Synthetic polynucleotide"
gcctccctcgcgccatcagttcggaacacgttcacggcagtagcagaaaacaaaggccctagagtggccattcttacctgaggagacggtgaccgtggtccctttgccccagacgtccatgtagtagtagtagtagtcgacttcggaacacgttcactcaacagtaatactcggccgtgtcctcagcctttaggctgctgatctgaagacacgccgtgctgacagacgtgtccatggagaagacaaaccatcctgtgaagccgtgggtatacgttgggttcccagtgtaggtgatgatccatcacatccactcaaagccctgtccaggggtctatcatacccaattcataccatagatggtgaaggtgtaaccagaagacttataggagaccttcactgaggccccaggcttcttcacctcaggcccagactgcaccagctgcagggagtgggcacctgtttcggaacacgttcacctgagcgggctggcaaggc

SEQ ID NO: 2547 - DNA, 448 bp, Artificial Sequence
  source: /note="Description of Artificial Sequence: Synthetic polynucleotide"
gcctccctcgcgccatcagttcggaacattacgctggcagtagcagaaaacaaaggccctagagtggccattcttacctgaggagacggtgaccgtggtccctttgccccagacgtccatgtagtagtagtagtagtcgacttcggaacattacgcttcatctctcatacagtcatacacggccgtgtcctcagcctttaggctgctgatcttcagatacgccatgctgacagaggtgtccatggagaatagaaaccgtcctgtgaagccgttggtatatgttgggttcccagtgtaggtgatgatccatcccatccactcaagcccttgtccaggggctggtcacactgaattcataccatactggctgcatagtattccatgatttacatatatcatattttatctaatcattcggaacattacgctctgagcgggctggcaaggc

SEQ ID NO: 2548 - DNA, 495 bp, Artificial Sequence
  source: /note="Description of Artificial Sequence: Synthetic polynucleotide"
gcctccctcgcgccatcagttcggaaccattgagtggcagtagcagaaaacaaaggccctagagtggccattcttacctgaggagacggtgaccgtggtccctttgccccagacgtccatgtagtagtagtagtagtcgacttcggaaccattgagttcaacacagtaataaatggctgcatcctcagtctttaggcagctagtctgcagatccgccgtgctgacagaggtgtccatggagaagacaaaccgtgtgtgaatctgtgggcatacattgggttcaccagggtaggatgatccatcccatccactcaagcccctgtcctggggtctgtcgtatccaattcataccataggtgatgacagtttaaccagacaccttgcaggagaccttcgccgaggccccaggctgcttcacctcaggcccagactgcaccagctgcactcgggagtgggcaccttcggaaccattgagtctgagcgggctggcaaggc

SEQ ID NO: 2549 - DNA, 495 bp, Artificial Sequence
  source: /note="Description of Artificial Sequence: Synthetic polynucleotide"
gcctccctcgcgccatcagaagtaacgcttggttatcagctcagccaaaaccctgcggctggtagggggcctgtggggctgggggctgatgtggctgcggtctccagggcgggtcgggtccaggggcccccagcagtcgacaagtaacgcttggttatcaacagtaatacacggccgtgtcgtcagatctcagcctgctcagctccatgtaggctgtgctgatggacgtgtccctggtcatggtgaccctgccctgaaacttctgtgcatagtttgtgccaccactgttagggttgatccatcccatccactcaagcccttgtccaggggcctgtcgcacccagtgcatatagtagccggtgaaggtgtatccagaagccttgcaggagaccttcactgaggccccaggcttcttcacctcagccccagactgcaccagctgcacctgggagtgggctccaagtaacgcttggttactgagcgggctggcaaggc

SEQ ID NO: 2550 - DNA, 495 bp, Artificial Sequence
  source: /note="Description of Artificial Sequence: Synthetic polynucleotide"
gcctccctcgcgccatcagaagtaacgacctcttgtcagctcagccaaaaccctgcggctggtagggggcctgtggggctgggggctgatgtggctgcggtctccagggcgggtcgggtccaggggcccccagcagtcgacaagtaacgacctcttgtcaacagtaatacacagccatgtcctcagatctcaggctgctcagctccatgtaggctgtgctcgcggatgtgtccctggtaatggtgactctgccctggaactcctgtgaatattttgtgttaccattgccagcgttgctccatcccatccactcaagcctttgtccgggggcctggcgcacccaatgcatagcatagctagtgaaggtgtatccagaagccttgcaggaaaccttcactgaggccccaggcttcttcacctcagccccagactgcaccagctgaacctgggagtggacaccaagtaacgacctcttgctgagcgggctggcaaggc

SEQ ID NO: 2551 - DNA, 495 bp, Artificial Sequence
  source: /note="Description of Artificial Sequence: Synthetic polynucleotide"
gcctccctcgcgccatcagaagtaacgctgattcttcagctcagccaaaaccctgcggctggtagggggcctgtggggctgggggctgatgtggctgcggtctccagggcgggtcgggtccaggggcccccagcagtcgacaagtaacgctgattcttcaacagtaatacacggccgtgtcctcagatctcaggctgctcagctccatgtaggctgtgcttatggaggtgttcctggtcatggtgactctgccctggaacttctgtgcatagcctgtgttaccactgttagggttcatccatcccatccactcaagcccttgtccagtggcctgtcgcacccagttgatatcataactggtgaaggtgtatccagaagccttgcaggagaccttcactgaggccccaggcttcttcacctcagccccagactgcaccagctgcacctgggagtgggcaccaagtaacgctgattctctgagcgggctggcaaggc

SEQ ID NO: 2552 - DNA, 495 bp, Artificial Sequence
  source: /note="Description of Artificial Sequence: Synthetic polynucleotide"
gcctccctcgcgccatcagaagtaacgagtaccgatcagctcagccaaaaccctgcggctggtagggggcctgtggggctgggggctgatgtggctgcggtctccagggcgggtcgggtccaggggcccccagcagtcgacaagtaacgagtaccgatcaacagtaatacacggccgtgtcgtcagatctcaggctcctcagctccatgtaggctgtgctcgtggatgtgtctgtggtcatggtgactctgccctggagcttctgtgcatagtttgtgttaccattgtaagcgctgatccatcccatccactcaagcccttgtccaggggcctgtcgcacccagctgataccatagctggtaaaggtgtaaccagaagccttgcaggagaccttcactgaggccccaggcttcttcacctcagctccagactgcaccagctgaacctgggagtgggcaccaagtaacgagtaccgactgagcgggctggcaaggc

SEQ ID NO: 2553 - DNA, 495 bp, Artificial Sequence
  source: /note="Description of Artificial Sequence: Synthetic polynucleotide"
gcctccctcgcgccatcagaagtaacgatccatggtcagctcagccaaaaccctgcggctggtagggggcctgtggggctgggggctgatgtggctgcggtctccagggcgggtcgggtccaggggcccccagcagtcgacaagtaacgatccatggtcaacagtaatacacggccgtgtcctcagatctcaggctgctcagctccatgtaggctgtgtctgtagatgtgtcctcggtcatggtgactctgccctggaacttctgtgcgtagattgtttcaccatcttcaggatcaaaacctcccatccactcaagcccttttccaggagcctgtcgcacccagtgcatggataattcagtgagggtgtatccggaaaccttgcaggagaccttcactgaggccccaggcttcttcacctcagccccagactgtaccagctggacctgggcgtgggtgccaagtaacgatccatggctgagcgggctggcaaggc

SEQ ID NO: 2554 - DNA, 495 bp, Artificial Sequence
  source: /note="Description of Artificial Sequence: Synthetic polynucleotide"
gcctccctcgcgccatcagaagtaacggtagcagttcagctcagccaaaaccctgcggctggtagggggcctgtggggctgggggctgatgtggctgcggtctccagggcgggtcgggtccaggggcccccagcagtcgacaagtaacggtagcagttcaacagtaatacatggctgtgtcctcagatctcaggctgctcagctccatgtaggctgtgctcatagacctgtccctggtaatggtgactctgtcctggaatttctgtgcgtagttggtgttaccattgaaaggtgtgatccatcccatccactcaagcgcttgtccgggggcctgtcgcacccagtgcaggtagcggtaggtgaaggtgtatccggaagccttgcaggaaaccttcactgaggacccagtcttcttcacctcagccccagactgcaccagctgcatctgggagtaggcatcaagtaacggtagcagtctgagcgggctggcaaggc

SEQ ID NO: 2555 - DNA, 495 bp, Artificial Sequence
  source: /note="Description of Artificial Sequence: Synthetic polynucleotide"
gcctccctcgcgccatcagaagtaacgatcttcgttcagctcagccaaaaccctgcggctggtagggggcctgtggggctgggggctgatgtggctgcggtctccagggcgggtcgggtccaggggcccccagcagtcgacaagtaacgatcttcgttcaacagtaatacacggccgtgtcctcagatctcaggctgctcagctccatgtagactgtgctcgtggacgtgtccctggtcatggtgactctgccctggaacttctgtgcgtagcttgtgctaccaccactagggttgattattcccatccactcaagcccttgtccaggggcctgtcgcacccagtgcatatagtagctggtgaaggtgtatccagatgccttgcaggaaaccttcactgaggccccaggcttcttcacctcagccccagactgcaccagctgcacctgggagtgagcaccaagtaacgatcttcgtctgagcgggctggcaaggc

SEQ ID NO: 2556 - DNA, 495 bp, Artificial Sequence
  source: /note="Description of Artificial Sequence: Synthetic polynucleotide"
gcctccctcgcgccatcagaagtaacgtccacagttcagctcagccaaaaccctgcggctggtagggggcctgtggggctgggggctgatgtggctgcggtctccagggcgggtcgggtccaggggcccccagcagtcgacaagtaacgtccacagttcaacagtaatacacggccgtgtcctcggatctcaggctgctcagctccatgtaggctgtgcttgtggacatgtccctggtaatggtgactctttcctggaacttctgtgcgtagtttgtgttaccactgccaacgacgatccatcctatccactcaaggcgttgtccacgagcctgtcgcacccactgcatagcagagctagtaaaggtgaatccagaagccttgcaggagaccttcactgaggtcccaggcttcttcacctcaggcccagactgcaccagctgcatttgggagtgggcaccaagtaacgtccacagtctgagcgggctggcaaggc

SEQ ID NO: 2557 - DNA, 495 bp, Artificial Sequence
  source: /note="Description of Artificial Sequence: Synthetic polynucleotide"
gcctccctcgcgccatcagaagtaacgagctagtgtcagctcagccaaaaccctgcggctggtagggggcctgtggggctgggggctgatgtggctgcggtctccagggcgggtcgggtccaggggcccccagcagtcgacaagtaacgagctagtgtcaacagtaatacacggccgtgtcctcagatctcaggctgctcagctccatgtaggctgtgctcgtggatttgtccgcggtaatcgtgactctgccctggaacttctgtgcgtagtttgctgtaccaaagatagggatgatccctcccatccactcaagcccttgtccaggggcctgtcgcacccagctgatagcatagctgctgaaggtgcctccagaagccttgcaggagaccttcaccgaggacccaggcttcttcacctcagccccagactgcaccagctgcacctgggactggacaccaagtaacgagctagtgctgagcgggctggcaaggc

SEQ ID NO: 2558 - DNA, 495 bp, Artificial Sequence
  source: /note="Description of Artificial Sequence: Synthetic polynucleotide"
gcctccctcgcgccatcagaagtaacgtaaccaagtcagctcagccaaaaccctgcggctggtagggggcctgtggggctgggggctgatgtggctgcggtctccagggcgggtcgggtccaggggcccccagcagtcgacaagtaacgtaaccaagtcaatagtaatacacagccatgtcctcagatgtcaggctgctcaggtctgtgtaggctgtggttgtggacatgtccctggtcatggtgaatctgccctgaaacttcttggcatagcttgggctaccattgccagggttgatccatcccatccactcaagcccttgtccaggggactgttgcacccaatgtataccgtagctggtgatggtaaacccagaaaaactacaggagactttcactgaggccccagacttcctcacctcagcccaagactgcaccagctggacctgggagtgggcaccaagtaacgtaaccaagctgagcgggctggcaaggc

SEQ ID NO: 2559 - DNA, 495 bp, Artificial Sequence
  source: /note="Description of Artificial Sequence: Synthetic polynucleotide"
gcctccctcgcgccatcagaagtaacgcaagaggttcagctcagccaaaaccctgcggctggtagggggcctgtggggctgggggctgatgtggctgcggtctccagggcgggtcgggtccaggggcccccagcagtcgacaagtaacgcaagaggttcaacagtaatacacggccgtgtcctcagatctcaggctgctcagctccatgtaggctgtgtctgtagacgtgtccgcggttatggtgactctgccctggaacttctctgcgtatattgtttcaccatcttcaggatcaacaagtcccatccactcaagcccttttccaggggcctgttgcacccagtgcatgtagtagtcggtgaaggtgtatccagaaaccttgcaggagattttcactgtagccccaggcttcttcacctcagccccagactgtaccagctggacctcggcgtgggtgccaagtaacgcaagaggtctgagcgggctggcaaggc

SEQ ID NO: 2560 - DNA, 495 bp, Artificial Sequence
  source: /note="Description of Artificial Sequence: Synthetic polynucleotide"
gcctccctcgcgccatcagaagtaacgagttgacctcagctcagccaaaaccctgcggctggtagggggcctgtggggctgggggctgatgtggctgcggtctccagggcgggtcgggtccaggggcccccagcagtcgacaagtaacgagttgacctcatgcacagtaatatgtggctgtgtccacagggtccatgttggtcattgtaaggaccacctggtttttggaggtgtccttggtgatggtgagcctgctcttcagagatgggctgtagcgcttatcatcattccaataaatgagtgcaagccactccagggcctttcctgggggctgacggatccagcccacacccactccactagtgctgagtgagaacccagagaaggtgcaggtcagcgtgagggtctgtgtgggtttcaccagcgtaggaccagactccttcaaggtgatctgggacaaaagtaacgagttgaccctgagcgggctggcaaggc

SEQ ID NO: 2561 - DNA, 495 bp, Artificial Sequence
  source: /note="Description of Artificial Sequence: Synthetic polynucleotide"
gcctccctcgcgccatcagaagtaacgcagcatattcagctcagccaaaaccctgcggctggtagggggcctgtggggctgggggctgatgtggctgcggtctccagggcgggtcgggtccaggggcccccagcagtcgacaagtaacgcagcatattcatgcacagtaatatgtggctgtgtccacagggtccatgttggtcatggtaaggaccacctggcttttggaggtgtccttggagatggtgagcctgctcttcagagatgtgctgtaggatttttcgtcattcgaaaaaatgtgtgcaagccactccagggccttccctgggggctgacggatccagctcacacccattctagcattgctgagtgagaacccagagacggtgcaggtcagcgtgagggtctctgtgggtttcaccagcacaggaccagactccttcaaggtgacctgggacaaaagtaacgcagcatatctgagcgggctggcaaggc

SEQ ID NO: 2562 - DNA, 495 bp, Artificial Sequence
  source: /note="Description of Artificial Sequence: Synthetic polynucleotide"
gcctccctcgcgccatcagaagtaacggcaggatttcagctcagccaaaaccctgcggctggtagggggcctgtggggctgggggctgatgtggctgcggtctccagggcgggtcgggtccaggggcccccagcagtcgacaagtaacggcaggatttcatgcacaataatacgtggctgtgtccacagggtccatgttggtcattgtaaggaccacctggtttttggaggtgtccttggagatggtgagcctggtcttcagagatgtgctgtagtatttatcatcatcccaatcaatgagtgcaagccactccagggccttccctgggggctgacggatccagctcacacacattccactagtgctgagtgagaacccagagaaggtgcaggtcagtgtgagggtctgtgtgggtttcaccagcgcaggaccagactccctcaaggtgacctgggataaaagtaacggcaggattctgagcgggctggcaaggc

SEQ ID NO: 2563 - DNA, 495 bp, Artificial Sequence
  source: /note="Description of Artificial Sequence: Synthetic polynucleotide"
gcctccctcgcgccatcagaagtaacggtccattctcagctcagccaaaaccctgcggctggtagggggcctgtggggctgggggctgatgtggctgcggtctccagggcgggtcgggtccaggggcccccagcagtcgacaagtaacggtccattctcaacagtaatacacagccgtgtcctcggctctcaggctgttcatttgcagatacagtgagttcttggcgttgtctctggagatggtgaatcggcccttcacagagtccacatagtatttctcacttccatcttgctttatgttggccacccactccagccccttccctggagcctggcggacccagctcatccaatagctactaaaggtgaatccagaggctgcacaggagagtctcagggaccccccaggctggaccaagcctcccccagactccaccagctgcacctcacactggacaccaagtaacggtccattcctgagcgggctggcaaggc

SEQ ID NO: 2564 - DNA, 495 bp, Artificial Sequence
  source: /note="Description of Artificial Sequence: Synthetic polynucleotide"
gcctccctcgcgccatcagaagtaacggcataacttcagctcagccaaaaccctgcggctggtagggggcctgtggggctgggggctgatgtggctgcggtctccagggcgggtcgggtccaggggcccccagcagtcgacaagtaacggcataacttcatgcacagtaatacaaggccgtgtcctcagctctcagactgttcatttgcagatacagggagttcttggcgttgtctctggagatggtgaatcggcccttcacagagtccgcatagcctatgctaccactattccaactaatacctgagacccactccaggcccttccctggagcttgccggacccagtgcatggcataatcatcaaaggtgaatccagaggctgcacaggagagtctcagggacctgccaggctgtaccaagcctcccccagactccaccagctgcacttcacactggacaagtaacggcataactctgagcgggctggcaaggc

SEQ ID NO: 2565 - DNA, 495 bp, Artificial Sequence
  source: /note="Description of Artificial Sequence: Synthetic polynucleotide"
gcctccctcgcgccatcagaagtaacgatatgctgtcagctcagccaaaaccctgcggctggtagggggcctgtggggctgggggctgatgtggctgcggtctccagggcgggtcgggtccaggggcccccagcagtcgacaagtaacgatatgctgtcaacagtaatacacggccgtgtcctcggctctcaggctgttcatttgcagatacagtgagttcttggcgttgtccctggagatggtgaatcggcccttcacagagtctgcgtagtatatggtactaccactactactaatgtatgaaacccactccagccccttccctggagcctggcggatccagctcatgtagtagtcactgaaggtgaatccagaggctgcacaggagagtctcagggaccctccaggcttgaccaagcctcccccagactccaccagctgcacctgacactggacaccaagtaacgatatgctgctgagcgggctggcaaggc

SEQ ID NO: 2566 - DNA, 495 bp, Artificial Sequence
  source: /note="Description of Artificial Sequence: Synthetic polynucleotide"
gcctccctcgcgccatcagaagtaacgaatcctgctcagctcagccaaaaccctgcggctggtagggggcctgtggggctgggggctgatgtggctgcggtctccagggcgggtcgggtccaggggcccccagcagtcgacaagtaacgaatcctgctcaacagtaatacacagccgtgtccccggctctcaggctgttcatttgaagatacaaggagttcttggcattttctctggagatggtgaatcggcccttcacggagcctggatagtatgtgtcaccagcagtaccaatagctgagacccactccagaccttttcctgtagcttggcggacccagtgcatgtcgtagctactgaaggtgaatccagaggctgcacaggagagtctcagggaccccccaggctgtaccaagcctcccccagactccaccagctgcacctcacactggacacctgcaagtaacgaatcctgcctgagcgggctggcaaggc

SEQ ID NO: 2567 - DNA, 495 bp, Artificial Sequence
  source: /note="Description of Artificial Sequence: Synthetic polynucleotide"
gcctccctcgcgccatcagaagtaacgtgagaccttcagctcagccaaaaccctgcggctggtagggggcctgtggggctgggggctgatgtggctgcggtctccagggcgggtcgggtccaggggcccccagcagtcgacaagtaacgtgagaccttcaacagtaatacacggctgtgtcctcggttttcaggctgttcatttgcagatacagcgtgttttttgaatcatctcttgagatggtgaatctgcctttcacgggtgcagcgtagtctgttgtcccaccatcagttttgcttttaatacggccaacccactccagccccttccctggagcctggcggacccagctcatccaggcgttactgaaagtgaatccagaggctgcacaggagagtctaagggaccccccaggctttaccaagcctcccccagactccaccagctgcacctcacactgaagtaacgtgagacctctgagcgggctggcaaggc

SEQ ID NO: 2568 - DNA, 495 bp, Artificial Sequence
  source: /note="Description of Artificial Sequence: Synthetic polynucleotide"
gcctccctcgcgccatcagaagtaacggaatggactcagctcagccaaaaccctgcggctggtagggggcctgtggggctgggggctgatgtggctgcggtctccagggcgggtcgggtccaggggcccccagcagtcgacaagtaacggaatggactcaacagtaatacacagccatgtcctcggctctccgtctgttcttttgcagatacagggagttcctggaattgtctctggagatgatgaatcggcgcttcacggagtccacatagtgcgtcctactgccattccaactaacacccgatacccactccagcccctttcctggagccttgcgggcccagttcatgtcactgttactgaaggtgaatccagaggctgcacaggagagtctcagggaccccccaggctgtaccaagcctcccccagactccaccagctgcacctcacactggacaccaagtaacggaatggacctgagcgggctggcaaggc

SEQ ID NO: 2569 - DNA, 495 bp, Artificial Sequence
  source: /note="Description of Artificial Sequence: Synthetic polynucleotide"
gcctccctcgcgccatcagaagtaacgcacatggatcagctcagccaaaaccctgcggctggtagggggcctgtggggctgggggctgatgtggctgcggtctccagggcgggtcgggtccaggggcccccagcagtcgacaagtaacgcacatggatcaacagtgatacaaggccgtgtcctcggctctcagactgttcatttgcagatacagggagttcttggcgttgtctctggagatggtgaatcggcccttcacagagtctgcataacctgtgctaccaccattccaattaataccagagacccactccagccccttccctggagcttggcggacccagctcatgccataatcatcaaaggtgaatccagaggctgcacaggagagtctcagggaccccccaggccgtaccacacctcccccagactccaccagctgcacctcacactggacaccaagtaacgcacatggactgagcgggctggcaaggc

SEQ ID NO: 2570 - DNA, 495 bp, Artificial Sequence
  source: /note="Description of Artificial Sequence: Synthetic polynucleotide"
gcctccctcgcgccatcagaagtaacgttgaccattcagctcagccaaaaccctgcggctggtagggggcctgtggggctgggggctgatgtggctgcggtctccagggcgggtcgggtccaggggcccccagcagtcgacaagtaacgttgaccattcaacagtaatacacagccgtgtcctcggctctcaggctgttcatttgcagatacagtgagttcttggcgttgtctctggagatggtgaatcggcccttcactgagtctgcgtagtatatgtaactactactactactaatggatgagacccactccagccccttccctggagcctggcggacccagttcatgctatagctactgaaggtgaatccagaggctgcacaggagagtctcagggaccccccaggcttgaccaggcctcccccagactccaccagctgcacctcacactggacaccaagtaacgttgaccatctgagcgggctggcaaggc

SEQ ID NO: 2571 - DNA, 495 bp, Artificial Sequence
  source: /note="Description of Artificial Sequence: Synthetic polynucleotide"
gcctccctcgcgccatcagaagtaacgaagccatctcagctcagccaaaaccctgcggctggtagggggcctgtggggctgggggctgatgtggctgcggtctccagggcgggtcgggtccaggggcccccagcagtcgacaagtaacgaagccatctcaacagtaatatacggccgtgtcctcggctctcaggctgttcatttgcagatacagcgtgttcttggaattgtctctggagatggtgaaccggcccttcacggagtctgcgtagtatgtgctaccaccactaccactaatagctgagacccactccagccccttccctggagcctggcggacccagctcatggcatagctgctaaaggtgaatccagaggctgcacaggagagtctcagggaccccccaggctgtaccaagcctcccccagactccaacagctgcacctcacactggacaccaagtaacgaagccatcctgagcgggctggcaaggc

SEQ ID NO: 2572 - DNA, 495 bp, Artificial Sequence
  source: /note="Description of Artificial Sequence: Synthetic polynucleotide"
gcctccctcgcgccatcagaagtaacgtccatgtgtcagctcagccaaaaccctgcggctggtagggggcctgtggggctgggggctgatgtggctgcggtctccagggcgggtcgggtccaggggcccccagcagtcgacaagtaacgtccatgtgtcaacagtaatacacagccgtgtcctcagctctcaggctgttcatttgcagatacagcgtgttcttggaattgtctctggagatggtgaatcggcccttcacggagtctgcatagtatttattacttccatcatatgatataactgccacccactccagccccttgcctggagcctggcggacccagtgcatgccatagctactgaaggtgaatccagaggctgcacaggagagtctcagggacctcccaggctggaccacgcctcccccagactccaccagctgcacctgacactggacaccaagtaacgtccatgtgctgagcgggctggcaaggc

SEQ ID NO: 2573 - DNA, 495 bp, Artificial Sequence
  source: /note="Description of Artificial Sequence: Synthetic polynucleotide"
gcctccctcgcgccatcagaagtaacgcaagtcactcagctcagccaaaaccctgcggctggtagggggcctgtggggctgggggctgatgtggctgcggtctccagggcgggtcgggtccaggggcccccagcagtcgacaagtaacgcaagtcactcaacagtaatacacagccgtgtcctcagctctcaggctgttcatttgcagatacagcgtgttcttggaattgtctctggagatggtgaatcggcccttcacggagtctgcatagtatttattacttccatcatatgatataactgccacccactccagccccttgcctggagcctggcggacccagtgcatgccatagctactgaaggtgaatccagaggctgcacaggagagtctcagggacctcccaggctggaccacgcctcccccagactccaccagctgcacctgacactggacaccaagtaacgcaagtcacctgagcgggctggcaaggc

SEQ ID NO: 2574 - DNA, 495 bp, Artificial Sequence
  source: /note="Description of Artificial Sequence: Synthetic polynucleotide"
gcctccctcgcgccatcagaagtaacgctgcaatctcagctcagccaaaaccctgcggctggtagggggcctgtggggctgggggctgatgtggctgcggtctccagggcgggtcgggtccaggggcccccagcagtcgacaagtaacgctgcaatctcaacagtaatacacagccgtgtcctcggctctcaggctgttcatttgcagatacagcgtgttcttggaattgtctctggagatggtgaatcggcccttcacggagtctgcatagtatttattacttccatcataccatataactgccacccactccagccccttgcctggagcctggcggacccagtgcatgccatagctactgaaggtgaatccagacgctgcacaggagagtctcagggacctcccaggctggaccacgcctcccccagactccaccagctgcacctgacactggacaccaagtaacgctgcaatcctgagcgggctggcaaggc

SEQ ID NO: 2575 - DNA, 495 bp, Artificial Sequence
  source: /note="Description of Artificial Sequence: Synthetic polynucleotide"
gcctccctcgcgccatcagaagtaacgatcgacgatcagctcagccaaaaccctgcggctggtagggggcctgtggggctgggggctgatgtggctgcggtctccagggcgggtcgggtccaggggcccccagcagtcgacaagtaacgatcgacgatcaacagtaatacacagccgtgtcctcggccctcaggctattcgtttgcagatacagggtgttcctggaattgtctctggagatgatgaatcggcccttcacagagtctgcatagtgcgtcctactgccattccaactaacacccgatacccactccagcccctttcctggagcctgatggacccagttcatgtcactgttactgaaggtgaatccagaggctgcacaggagagtctcagggatcccccaggctgtaccaagcctcccccagactccaccagctgcacctcacactggacaccaagtaacgatcgacgactgagcgggctggcaaggc

SEQ ID NO: 2576 - DNA, 495 bp, Artificial Sequence
  source: /note="Description of Artificial Sequence: Synthetic polynucleotide"
gcctccctcgcgccatcagaagtaacgacagactgtcagctcagccaaaaccctgcggctggtagggggcctgtggggctgggggctgatgtggctgcggtctccagggcgggtcgggtccaggggcccccagcagtcgacaagtaacgacagactgtcaacagtaatacacggccgtgccctcagctctcaggttgttcatttgaagatacagcgtgttcttggaattgtctctggagatggtgaatctgcccttcctggagtctgcgtagtatgtgctaccaccactaatggatgagacccactccagccccttccctggagcctggcggatccagctcatctcattgctactgacggtgaatccagaggctgcacaggagagtctcagggaccccctaggctgtaccaagcctcccccagactccaccagctgcacctcacactggacacctgcaaaaagtaacgacagactgctgagcgggctggcaaggc

SEQ ID NO: 2577 - DNA, 495 bp, Artificial Sequence
  source: /note="Description of Artificial Sequence: Synthetic polynucleotide"
gcctccctcgcgccatcagaagtaacgccttatagtcagctcagccaaaaccctgcggctggtagggggcctgtggggctgggggctgatgtggctgcggtctccagggcgggtcgggtccaggggcccccagcagtcgacaagtaacgccttatagtcatgcacagtaatacaaggcggtgtcctcagttctcagactgttcatttgcagatacagggagtttttgctgttgtctctggagatggtgaatcggcccttcacagagtctgcatagtatgtgctaccaccatcccaactaataagagagacccactccagacccttccccggagcttgacggacccagtgcatggtataatcatcaaaggtgaatccagaggctgcacaggagagtctcagggaccccccaggctgtaccacgactcccccagactccaccagctgcacttcacactggacaagtaacgccttatagctgagcgggctggcaaggc

SEQ ID NO: 2578 - DNA, 495 bp, Artificial Sequence
  source: /note="Description of Artificial Sequence: Synthetic polynucleotide"
gcctccctcgcgccatcagaagtaacgtacgcgtttcagctcagccaaaaccctgcggctggtagggggcctgtggggctgggggctgatgtggctgcggtctccagggcgggtcgggtccaggggcccccagcagtcgacaagtaacgtacgcgtttcaacagtaatacacagccgtgtcctcgtctctcaggctgttcatttgcagatacagtgagttcttggcattgtctctggagatggtgaatcggcccttcacagagtctgcgtagtatatggtactactactactactaatgtatgaaacccactccagccccttccctggagcctggcggacccagttcatgctatagctactgaaggtgaatccagaggctgcacaggagagtctcagggaccccccaggctgtaccaagcctcccccagactccaccagctgcacctcacactggacaccaagtaacgtacgcgttctgagcgggctggcaaggc

SEQ ID NO: 2579 - DNA, 495 bp, Artificial Sequence
  source: /note="Description of Artificial Sequence: Synthetic polynucleotide"
gcctccctcgcgccatcagaagtaacgctataaggtcagctcagccaaaaccctgcggctggtagggggcctgtggggctgggggctgatgtggctgcggtctccagggcgggtcgggtccaggggcccccagcagtcgacaagtaacgctataaggtcaacagtaatacacggctgtgtcctcggttttcaggctgttcatttgcagataggcgatgcttttggaatcatctcttgagatggtgaatctgcctttcacagacgcggcgtattctgttgtcccaccataagctttgcttctaatgaaacctacccactccagccccttccctggagcctggcggaaccagctcatagcataatcaccaaaggtgaatccagaagctgtacaggagagtctcagggaccgccctggctgtaccaagcctcccccagactccaccagctgcacctcacattgaagtaacgctataaggctgagcgggctggcaaggc

SEQ ID NO: 2580 - DNA, 495 bp, Artificial Sequence
  source: /note="Description of Artificial Sequence: Synthetic polynucleotide"
gcctccctcgcgccatcagaagtaacgtcttagtctcagctcagccaaaaccctgcggctggtagggggcctgtggggctgggggctgatgtggctgcggtctccagggcgggtcgggtccaggggcccccagcagtcgacaagtaacgtcttagtctcaacagtaatacacggccgtgtcctcggctctcaggctgttcatttgaagatacagcgtgttcttggaattgtctctggagatggtgaatcggcccttcacggagtctgcgtagtatgtgctaccaccgctataaataactgagacccactccagccccttccctggagcctggcggacccagctcatgtagttgctactgacggtgaacccagaggctgcacaggagagtctcagggaccccccaggctggatcaagcctcctccagactccaccagctgcacctcacactggacacctgcaagtaacgtcttagtcctgagcgggctggcaaggc

SEQ ID NO: 2581 - DNA, 495 bp, Artificial Sequence
  source: /note="Description of Artificial Sequence: Synthetic polynucleotide"
gcctccctcgcgccatcagaagtaacgtgtctgcatcagctcagccaaaaccctgcggctggtagggggcctgtggggctgggggctgatgtggctgcggtctccagggcgggtcgggtccaggggcccccagcagtcgacaagtaacgtgtctgcatcaacagtaatacacagccatgtcctcagctctcaggctgcccatttgaagatacagcgtgttcttggaattgtctctggagatggtgaatctgcccttcacagagtctgcataatatgtgctacccccattactactaatagctgaaacatattccagtcccttccctggagcctggcggacccagtgcatagcatagctactgaaggtgaatccagaggctgcacaggagagtctcagggaccccccaggctggaccaagccttccccagactccaccagctgcacctcacactggacaccaagtaacgtgtctgcactgagcgggctggcaaggc

SEQ ID NO: 2582 - DNA, 495 bp, Artificial Sequence
  source: /note="Description of Artificial Sequence: Synthetic polynucleotide"
gcctccctcgcgccatcagaagtaacggccattaatcagctcagccaaaaccctgcggctggtagggggcctgtggggctgggggctgatgtggctgcggtctccagggcgggtcgggtccaggggcccccagcagtcgacaagtaacggccattaatcaacagtaatacacagccgtgtcctcagctctcaggctgttcatttgaagatacagcgtgttcttggaattgtctctggagatggtgaatcggcccttcacggagtctgcgtagtatgtgctaccacagctataaataactgagacccactccagccccttccctggagcctggcggacccagctcatgtagttgctactgacggtgaacccagaggctgcacaggagagtctcagggaccccccaggctggatcaagcctcctccagactccaccagctgcacctcacactggacacctgcaagtaacggccattaactgagcgggctggcaaggc

SEQ ID NO: 2583 - DNA, 495 bp, Artificial Sequence
  source: /note="Description of Artificial Sequence: Synthetic polynucleotide"
gcctccctcgcgccatcagaagtaacggactaagatcagctcagccaaaaccctgcggctggtagggggcctgtggggctgggggctgatgtggctgcggtctccagggcgggtcgggtccaggggcccccagcagtcgacaagtaacggactaagatcaacagtaatacacggccgtgtcctcggttttcaggctgttcatttgcagatacagtgagttctttgaatcatctcttgagatggtgaatctgcctttcacagacgcggcgtattctgtggtgtaactgttagctttgtttctagtacggccaacccactccagccccttccctggagcctggcggacccagtccatgtagtggtcactgaaggtgaatccagaggctgcacaggagagtctcagggaccctccaggctggaccaagcctcccccagactccaccagctgcacctcacactgaagtaacggactaagactgagcgggctggcaaggc

SEQ ID NO: 2584 - DNA, 495 bp, Artificial Sequence
  source: /note="Description of Artificial Sequence: Synthetic polynucleotide"
gcctccctcgcgccatcagaagtaacgaggttgcttcagctcagccaaaaccctgcggctggtagggggcctgtggggctgggggctgatgtggctgcggtctccagggcgggtcgggtccaggggcccccagcagtcgacaagtaacgaggttgcttcaacagtaatacacggccgtgtcctcggttttcaggctgttcatttgcagatacgccgtgttctttgaatcatctctggagatggtgaacctgcctttcaccgacgcagcatatgctgtcgcgtaactgttagctttgcttctaatacggccaacccactccagccctttcccggaagcctggcggacccagtgcatagcagagccactgaaggtgaacccagaggctgcacaggagagtttcagggaccccccaggctggaccaagcctcccccggactccaccagctgcacctcacactgaagtaacgaggttgctctgagcgggctggcaaggc

SEQ ID NO: 2585 - DNA, 495 bp, Artificial Sequence
  source: /note="Description of Artificial Sequence: Synthetic polynucleotide"
gcctccctcgcgccatcagaagtaacgctcgagaatcagctcagccaaaaccctgcggctggtagggggcctgtggggctgggggctgatgtggctgcggtctccagggcgggtcgggtccaggggcccccagcagtcgacaagtaacgctcgagaatcaacagtaatacacagccgtgtcctcggctctcagactgttcatttgcagatacagcgtgttcttggcgttgtctctggagatggtgaatcggcccttcacggagtccgcgtagcttgtgctactcccatcactattaatacgtgagacccacaccagccccttccctggagcttggcggacccagtgcatccagtagctactgaaggtgaatccagaggctgcacaggagagtctcagggaccccccaggctgaactaagcctcccccggactccaccagctgcacctcacactggacaccaagtaacgctcgagaactgagcgggctggcaaggc

SEQ ID NO: 2586 - DNA, 495 bp, Artificial Sequence
  source: /note="Description of Artificial Sequence: Synthetic polynucleotide"
gcctccctcgcgccatcagaagtaacgttaatggctcagctcagccaaaaccctgcggctggtagggggcctgtggggctgggggctgatgtggctgcggtctccagggcgggtcgggtccaggggcccccagcagtcgacaagtaacgttaatggctcaacagtaatacacagccgtgtcctcagctctcaggctgttcatttgcagatacagcgtgttcttggaattgtctctggagatggtgaatcggcccttcacggagtctgcatagtatttattacttccatcataccgtataaatgccacccactccagccccttgcctggagcctggcggacccagtgcatgccatagctactgaaggtgaatccagacgctgcacaggagagtctcagggaccccccaggctggaccacgcctcccccagactccaccagctgcacctgacactggacaccaagtaacgttaatggcctgagcgggctggcaaggc

SEQ ID NO: 2587 - DNA, 495 bp, Artificial Sequence
  source: /note="Description of Artificial Sequence: Synthetic polynucleotide"
gcctccctcgcgccatcagaagtaacgtgcagacatcagctcagccaaaaccctgcggctggtagggggcctgtggggctgggggctgatgtggctgcggtctccagggcgggtcgggtccaggggcccccagcagtcgacaagtaacgtgcagacatcaacagtaatacacagccgtgtcctcagctctcaggctgttcatttgaagatgcagcgtgttcttggaattgtctctggagatggtgaatctgcccttcctggagtctgcgtagtatgtgctaccaccactaatggatgagacccactccagacccttccctggagcctggcggacccagctcatctcattgctactgacggtgaatccagaggctgcacaggagagtctcagggaccccccaggctgtaccaagactccccgagactccaccagctgcacctcacactggacacctgcaaaaagtaacgtgcagacactgagcgggctggcaaggc

SEQ ID NO: 2588 - DNA, 495 bp, Artificial Sequence
  source: /note="Description of Artificial Sequence: Synthetic polynucleotide"
gcctccctcgcgccatcagaagtaacgtcactgagtcagctcagccaaaaccctgcggctggtagggggcctgtggggctgggggctgatgtggctgcggtctccagggcgggtcgggtccaggggcccccagcagtcgacaagtaacgtcactgagtcaacagtaatacacggccgtgtccgcggcggtcacagagctcagcttcagggagaactggttcttggacgtgtctactgacatggtgactcgactcttgagggaggggttgtagttggtgctcccactggtatagatacgcccaatccactccagtcccttcccggcgggctgccggatccagctccagtagtaactactgatggagccaccagagacagtgcaggtgagggacagggtctccgaaggcttcaccagtcctgggcccgactcctgcagctgcacctgggacaggacccctgtaagtaacgtcactgagctgagcgggctggcaaggc

SEQ ID NO: 2589 - DNA, 495 bp, Artificial Sequence
  source: /note="Description of Artificial Sequence: Synthetic polynucleotide"
gcctccctcgcgccatcagaagtaacggagtacgttcagctcagccaaaaccctgcggctggtagggggcctgtggggctgggggctgatgtggctgcggtctccagggcgggtcgggtccaggggcccccagcagtcgacaagtaacggagtacgttcaacagtaatacacggccgtgtccacggcggtcacagagctcagcttcagggagaactggttcttggacgtgtctactgacatggtgactcgactcttgagggacgggttgtagtaggtgctcccactataatagatgtacccaatccactccagtcccttccctgggggctgccggatccagccccaccagttactactgctgatggagtaaccagagacagcgcaggtgagggacagggtgtccgaaggcttcaccagtcctgggcccgactcctgcagctgcacctgggacaggaccacaagtaacggagtacgtctgagcgggctggcaaggc

SEQ ID NO: 2590 - DNA, 495 bp, Artificial Sequence
  source: /note="Description of Artificial Sequence: Synthetic polynucleotide"
gcctccctcgcgccatcagaagtaacgatacgccatcagctcagccaaaaccctgcggctggtagggggcctgtggggctgggggctgatgtggctgcggtctccagggcgggtcgggtccaggggcccccagcagtcgacaagtaacgatacgccatcaacagtaatacacggccgtgtccgcggcggtcacagagctcagcttcagggagaactggttcttggacctgtctactgatatggtgactcgactcttgagggacgggttgtagtaggtgctcccactatgatagatgtacccaatccactccaggcccttccctggtggctgccggatccagctccaggagtaaccaccactgctgatggagccaccagagacagcgcaggtgagggacagggtctgtgaaggcttcaccagtcctgagccggactcctgcagctgcagctgggacaggacaagtaacgatacgccactgagcgggctggcaaggc

SEQ ID NO: 2591 - DNA, 495 bp, Artificial Sequence
  source: /note="Description of Artificial Sequence: Synthetic polynucleotide"
gcctccctcgcgccatcagaagtaacgtcgcatcatcagctcagccaaaaccctgcggctggtagggggcctgtggggctgggggctgatgtggctgcggtctccagggcgggtcgggtccaggggcccccagcagtcgacaagtaacgtcgcatcatcaacagtaatacacggccgtgtctgcggcagtcacagagctcagcttcagggagaactggttcttggacgtgtctactgatatggtaactcgactcttgagggacgggttgtagtaggtgctcccactgtaatagatgtacccaatccactccaggcccttccctgggggctggcggatccaactccagtagtaatcaccactgctgatggagccaccagagacagtgcaggtgagggacagggtctgtgaaggcttcaccagtcctgggcccgactcctgcagctgcacctgggacaggacaagtaacgtcgcatcactgagcgggctggcaaggc

SEQ ID NO: 2592 - DNA, 495 bp, Artificial Sequence
  source: /note="Description of Artificial Sequence: Synthetic polynucleotide"
gcctccctcgcgccatcagaagtaacgcgcttaattcagctcagccaaaaccctgcggctggtagggggcctgtggggctgggggctgatgtggctgcggtctccagggcgggtcgggtccaggggcccccagcagtcgacaagtaacgcgcttaattcaacagtaatacacggccgtgtccgcggcagtcacagagctcagcttcagggagaactggttcttagacgtgtctactgatatggtaactcgactcttgagggacgggttgtagtaggtgctcccactgtaatagatgtacccaatccactccaggcccttccctgggtgctggcggatccagctccagtagtaaccaccactgctgatggagccaccagagacagtacaggtgagggacagggtctgtgaaggcttcaccagtcctgggcccgactcctgcagctgcacctggggcaggacaagtaacgcgcttaatctgagcgggctggcaaggc

SEQ ID NO: 2593 - DNA, 495 bp, Artificial Sequence
  source: /note="Description of Artificial Sequence: Synthetic polynucleotide"
gcctccctcgcgccatcagaagtaacgtggttatctcagctcagccaaaaccctgcggctggtagggggcctgtggggctgggggctgatgtggctgcggtctccagggcgggtcgggtccaggggcccccagcagtcgacaagtaacgtggttatctcaacagtaatacacagccgtgtccgcggcggtcacagagctcagcttcagggagaactggttcttggacgtgtctactgatatggtgactcgactcttgagggacgggttgtagttggtgcttccactatgattgatttccccaatccactccagccccttccctgggggctggcggatccagctccagtagtaaccactgaaggacccaccatagacagcgcaggtgagggacagggtctccgaaggcttcaacagtcctgcgccccactgctgtagctgcacctgggacaggacccctgtaagtaacgtggttatcctgagcgggctggcaaggc

SEQ ID NO: 2594 - DNA, 495 bp, Artificial Sequence
  source: /note="Description of Artificial Sequence: Synthetic polynucleotide"
gcctccctcgcgccatcagaagtaacgggattgcttcagctcagccaaaaccctgcggctggtagggggcctgtggggctgggggctgatgtggctgcggtctccagggcgggtcgggtccaggggcccccagcagtcgacaagtaacgggattgcttcaacagtaatacacagccgtgtctgcggcggtcacagagctcagcttcagggagaactggttcttggacgtgtctacggatatggtgactcgactcttgagggacgggttgtagtaggtgctcccactataatagatactcccaatccactccagccccttccctgggggctggcggatccagccccagtagtaactactactgctgatggagccaccagagacagtgcaggtgagggacagggtctccgaaggcttcaccagtcctgggcccgactcctgcagctgcagctgggacaggacaagtaacgggattgctctgagcgggctggcaaggc

SEQ ID NO: 2595 - DNA, 495 bp, Artificial Sequence
  source: /note="Description of Artificial Sequence: Synthetic polynucleotide"
gcctccctcgcgccatcagaagtaacgctcagtgatcagctcagccaaaaccctgcggctggtagggggcctgtggggctgggggctgatgtggctgcggtctccagggcgggtcgggtccaggggcccccagcagtcgacaagtaacgctcagtgatcaacagtaatacacggccgtgtccgcagcggtcacagagctcagcttcagggagaactggttcttggacgtgtctactgatatggtgactcgactcttgagggaggggttgtagttggtgctcccactgtaatagatatacccaatccactccagtcccttccctgggggctgccggatccagctccagtagtaactactgatggagccaccagagacagtgcaggtgagggacagggtctccgaaggcttcaccagtcctgggcccgactcctgcagctgcacctgggacaggacccctgtaagtaacgctcagtgactgagcgggctggcaaggc

SEQ ID NO: 2596 - DNA, 495 bp, Artificial Sequence
  source: /note="Description of Artificial Sequence: Synthetic polynucleotide"
gcctccctcgcgccatcagaagtaacgacgtactctcagctcagccaaaaccctgcggctggtagggggcctgtggggctgggggctgatgtggctgcggtctccagggcgggtcgggtccaggggcccccagcagtcgacaagtaacgacgtactctcaacagtaatacacggccgtgtccgcagcggtcacagagctcagcttcagggagaactggttcttggacgtgtctactgatatggtgactcgactcttgagggaggggttgtagttggtgctcccactgtaatagatatacccaatccactccagtcccttccctgggggctgccggatccagctccagtagtaaccaccactgctgacggagccaccagagacagtgcaggtgagggacagggtctccgaaggcttcaccagtcctgggcccgactcctgcagctgcacctgggacaggacaagtaacgacgtactcctgagcgggctggcaaggc

SEQ ID NO: 2597 - DNA, 495 bp, Artificial Sequence
  source: /note="Description of Artificial Sequence: Synthetic polynucleotide"
gcctccctcgcgccatcagaagtaacgtgatgcgatcagctcagccaaaaccctgcggctggtagggggcctgtggggctgggggctgatgtggctgcggtctccagggcgggtcgggtccaggggcccccagcagtcgacaagtaacgtgatgcgatcaacagtaatacacggccgtgtctgcggcggtcacagagctcagcttcagggagaactggttcttggacgtgtctactgatatggtgactcgactcttgagggacgggttgtagtaggtgctcccactatgatagatactcccaatccactccagccccttccctgggggctgccggatccagccccagtagtaaccactgctgatggagtaaccagagacagcgcaggtgagggacagggtctccgaaggcttcaccagtcctgggcccgactcctgcagctgcacctgggacaggaccccaagtaacgtgatgcgactgagcgggctggcaaggc

SEQ ID NO: 2598 - DNA, 495 bp, Artificial Sequence
  source: /note="Description of Artificial Sequence: Synthetic polynucleotide"
gcctccctcgcgccatcagaagtaacgattaagcgtcagctcagccaaaaccctgcggctggtagggggcctgtggggctgggggctgatgtggctgcggtctccagggcgggtcgggtccaggggcccccagcagtcgacaagtaacgattaagcgtcaacagtaatacatggcggtgtccgaggccttcaggctgctccactgcaggtaggcggtgctgatggacttgtcggctgagatggtgacctggccttggaaggacgggctgtatctggtatcagagtcaccaggatagatgatccccatccactccaggcctttcccgggcatctggcgcacccagccgatccagtagctggtaaagctgtatccagaacccttacaggagatcttcagagactccccgggctttttcacctctgctccagactgcaccagctgcacctcggcacagactccaagtaacgattaagcgctgagcgggctggcaaggc

SEQ ID NO: 2599 - DNA, 495 bp, Artificial Sequence
  source: /note="Description of Artificial Sequence: Synthetic polynucleotide"
gcctccctcgcgccatcagaagtaacgagcaatcctcagctcagccaaaaccctgcggctggtagggggcctgtggggctgggggctgatgtggctgcggtctccagggcgggtcgggtccaggggcccccagcagtcgacaagtaacgagcaatcctcaacagtaatacatggcggtgtccgaggccttcaggctgctccactgcaggtaggcagtgctgatggacttgtcagctgagatggtgacgtggccttggaaggacgggctgtagttggtataagagtcactaggatcaatcctccccatccactccaagcctttcccgggcatctggcgcacccagctgatccagtagctggtaaagctgtatccagaacccttacaggagatcctcagagactccccgggctttttcacctctgctccagactgcaccagctgcacttcggcacagactccaagtaacgagcaatccctgagcgggctggcaaggc

SEQ ID NO: 2600 - DNA, 495 bp, Artificial Sequence
  source: /note="Description of Artificial Sequence: Synthetic polynucleotide"
gcctccctcgcgccatcagaagtaacggcttagtatcagctcagccaaaaccctgcggctggtagggggcctgtggggctgggggctgatgtggctgcggtctccagggcgggtcgggtccaggggcccccagcagtcgacaagtaacggcttagtatcaacagtaatacacagccgtgtcctcgggagtcacagagttcagctgcagggagaactggttcttggatgtgtctgggttgatggttattcgacttttcacagatactgcataatcattataccacttggacctgtagtatgtccttcccagccactcaaggcctctcgatggggactgcctgatccagttccaagcagcactgttgctagagacactgtccccggagatggcacaggtgagtgagagggtctgcgagggcttcaccagtcctggacctgactgctgcagctgtacctgtgaaagtaacggcttagtactgagcgggctggcaaggc

SEQ ID NO: 2601 - DNA, 495 bp, Artificial Sequence
  source: /note="Description of Artificial Sequence: Synthetic polynucleotide"
gcctccctcgcgccatcagaagtaacgtgaccttgtcagctcagccaaaaccctgcggctggtagggggcctgtggggctgggggctgatgtggctgcggtctccagggcgggtcgggtccaggggcccccagcagtcgacaagtaacgtgaccttgtcaacagtaatacacggcagtgtcctcagcctttaggctgcagatctgcagatatgccgtgctgacagaggtgtccaaggagaagacaaaccgtcctgtgaagccctgggcatacgttgggttcccagtgttggtgttgatccatcccatccactcaagcccttgtccaggggcctgtcgcacccaattcatagcatagctagtgaaggtgtatccagaagccttgcaggaaaccttcactgaggccccaggcttcttcaactcagacccagattgcaccagctgcacctgggagtgggcaccaagtaacgtgaccttgctgagcgggctggcaaggc

SEQ ID NO: 2602 - DNA, 495 bp, Artificial Sequence
  source: /note="Description of Artificial Sequence: Synthetic polynucleotide"
gcctccctcgcgccatcagaagtaacgcaaggtcatcagctcagccaaaaccctgcggctggtagggggcctgtggggctgggggctgatgtggctgcggtctccagggcgggtcgggtccaggggcccccagcagtcgacaagtaacgcaaggtcatcaacagtaatacatggccatgtcctcagcctttaggctgctgatctgcaggtatgctgtgctggcagaggtgtccatggagaagacaaaccgtcctgtgaagccctgggcatatgttgggttcccagtgtaggtgttgaaccatcccatccactcaagcccttgtccaggggcctgtggcacccaattcataccataggtggtgaaactgtaaccagaagccttgcaggagaccttcactgaggccccaggctgcttcacctcatggccagactgcaccagctgcacctgggagtaggtaccaagtaacgcaaggtcactgagcgggctggcaaggc

SEQ ID NO: 2603 - DNA, 495 bp, Artificial Sequence
  source: /note="Description of Artificial Sequence: Synthetic polynucleotide"
gcctccctcgcgccatcagaagtaacgcactgtactcagctcagccaaaaccctgcggctggtagggggcctgtggggctgggggctgatgtggctgcggtctccagggcgggtcgggtccaggggcccccagcagtcgacaagtaacgcactgtactcagggaatgtgcggccctgcccttggccatcacggagctcagctgcagggataactgggccttggatgtgtctctacagatggagagttggcccagaaaggctgggctgaagtgtgtgctgcccctggagctgaggtgccccagcgccttcccagagggctgctgggtccaggcccagaggtctgtgaggacctcaccagccctgggcatgactccagtagctgcatctgatgcaggacactcagggacaagaagcaaagagatgagtcacaagcggacaccacagcccacagcccccgttcaagtaacgcactgtacctgagcgggctggcaaggc

SEQ ID NO: 2604 - DNA, 495 bp, Artificial Sequence
  source: /note="Description of Artificial Sequence: Synthetic polynucleotide"
gcctccctcgcgccatcagaagtaacggatgatcctcagctcagccaaaaccctgcggctggtagggggcctgtggggctgggggctgatgtggctgcggtctccagggcgggtcgggtccaggggcccccagcagtcgacaagtaacggatgatcctcagtataaaaatccatggtggtttactcattgtgcgggtagctcagctgtaggaaaaactgttttctgaatgtggatctggaggtggtgactggactcttgagaagcgggttgcactgtgtgtttcctcgtgacctacacacctgacccacttcagcttcttccctgggggctggcagatacagctccaggaggaagtactggttatgattggaaatccagagacagcacaggtgaaggagagggtctctgagggctttactagaacatgagtgcactgaaaaacacaatttttttcataggaagtaacggatgatccctgagcgggctggcaaggc

SEQ ID NO: 2605 - DNA, 495 bp, Artificial Sequence
  source: /note="Description of Artificial Sequence: Synthetic polynucleotide"
gcctccctcgcgccatcagaagtaacgcgccaatatcagctcagccaaaaccctgcggctggtagggggcctgtggggctgggggctgatgtggctgcggtctccagggcgggtcgggtccaggggcccccagcagtcgacaagtaacgcgccaatatcaataaaaatcatggttgtgtactccttgttaaggtagctcagctgtaggagaaactgttttttggatgtggatctggagatggtgactggactcttgaggagtgggttggattgtgcactccctcatgacctgtgcacctgattcgctccagtcccttccccggggggtgacggatccagctccagcaggaagcactggttgtaatggagaagcagagatgccacaggccagggggaggatctgtgagggcttcaccaggccaggagtgcaccgagaatcacagttgtcggcatgcacaggaagtaacgcgccaatactgagcgggctggcaaggc

SEQ ID NO: 2606 - DNA, 495 bp, Artificial Sequence
  source: /note="Description of Artificial Sequence: Synthetic polynucleotide"
gcctccctcgcgccatcagaagtaacgtcaagccttcagctcagccaaaaccctgcggctggtagggggcctgtggggctgggggctgatgtggctgcggtctccagggcgggtcgggtccaggggcccccagcagtcgacaagtaacgtcaagccttcacagtaatactcagccgtgtcctaggtggtcatggagctgagcttcacagagaactggctcttggttgagtcactgttgatggggacatggacctgggtggagggtgcatgatgtgtattccttgatgatccagtctagtaactgtgccccagccattccagcctgttgcccacgggatggtggattcatctcaaataatatccatggtaaaaaaaagaatccagacacagcacaggcagagggcagtgtctgagggcctcatgggtcctggacctgactcctgcagctgcacctgggacaaagtaacgtcaagcctctgagcgggctggcaaggc

SEQ ID NO: 2607 - DNA, 495 bp, Artificial Sequence
  source: /note="Description of Artificial Sequence: Synthetic polynucleotide"
gcctccctcgcgccatcagaagtaacgacgtgtgttcagctcagccaaaaccctgcggctggtagggggcctgtggggctgggggctgatgtggctgcggtctccagggcgggtcgggtccaggggcccccagcagtcgacaagtaacgacgtgtgttcacttaaaaatgcgtagttgtgtgttcactgggcacagagctcagctgtaagaactgtttcttggatctggatatggactcttgagcagtgggttgtaatttgtgctcccttcacaacccatgcacctgatccactcctgtccatcttctaggggcaagcagatacaattctagcaggaaacactggttatgatggggaatccagagacagtgcaggtgaggagagggtctgcaaggagtctcaagccagaagtgtgctgagaaacatagttgttgatgttaacaggttctgggcaacacagaagtaacgacgtgtgtctgagcgggctggcaaggc

SEQ ID NO: 2608 - DNA, 495 bp, Artificial Sequence
  source: /note="Description of Artificial Sequence: Synthetic polynucleotide"
gcctccctcgcgccatcagaagtaacgtccgtctatcagctcagccaaaaccctgcggctggtagggggcctgtggggctgggggctgatgtggctgcggtctccagggcgggtcgggtccaggggcccccagcagtcgacaagtaacgtccgtctatcagctctaaaatacatggctatgtgtttgttcctcacatagttcagctgtaagaagaactactttttggacatggatctggagatggtgactggactcttgagaagaggggagtaatttgtgctccctccatgacctatgcacccgatccactccagtacctcccatgggggcgctgatggatgcagctccagcaggaaacactggttgtgatggagaatgcagagatggcacaggtgagggagaggttctgtgaaggcttcaccaggccaagagtgcaccgagaaatacagttgttggcagaagtaacgtccgtctactgagcgggctggcaaggc

SEQ ID NO: 2609 - DNA, 495 bp, Artificial Sequence
  source: /note="Description of Artificial Sequence: Synthetic polynucleotide"
gcctccctcgcgccatcagaagtaacgaagagctgtcagctcagccaaaaccctgcggctggtagggggcctgtggggctgggggctgatgtggctgcggtctccagggcgggtcgggtccaggggcccccagcagtcgacaagtaacgaagagctgtcattcaaaatgtgtagttgtgtgttcactgggcacagagctcagctgtaagaactgtttcttggatctggatatggactcttgagaagtgggatgtaatttttgctccctttacaacccatgaacctgatccactcctgtccatcttctaggggcaagcagatacaattctagcaggacacactggttatgatggggaatccagagacagtgcaggtgagggagagggtctgtgaggatgtctcaagccagaagtgcactggaaaacacagttgttgatgttaacagtttctggacaacacgaagtaacgaagagctgctgagcgggctggcaaggc

SEQ ID NO: 2610 - DNA, 495 bp, Artificial Sequence
  source: /note="Description of Artificial Sequence: Synthetic polynucleotide"
gcctccctcgcgccatcagaagtaacgtatcgctctcagctcagccaaaaccctgcggctggtagggggcctgtggggctgggggctgatgtggctgcggtctccagggcgggtcgggtccaggggcccccagcagtcgacaagtaacgtatcgctctcagctctaaaatacatggctatgtgtttgttgctcacatagttcacctgtaagaagaagtactttttggacatggatctggagatggtgactggactcttgagaagaggggagtaatctgtgctccctccatgacctatgcacccgatccactccagtacctcccatgggggcgctgatggatgcagctccagaaggaaacactggttgtgatggagaatgcagagatggcacaggtgagggagaggttctgtgaaggcttcaccaggccaagagtgcaccgagaaatacagttgttggcagaagtaacgtatcgctcctgagcgggctggcaaggc

SEQ ID NO: 2611 - DNA, 495 bp, Artificial Sequence
  source: /note="Description of Artificial Sequence: Synthetic polynucleotide"
gcctccctcgcgccatcagaagtaacgtcagatgctcagctcagccaaaaccctgcggctggtagggggcctgtggggctgggggctgatgtggctgcggtctccagggcgggtcgggtccaggggcccccagcagtcgacaagtaacgtcagatgctcatgaaagaagaattcatgtgcagacacatctgcttgtctgaagatatagtgcatgtgggaacatgtgggcttgtctgaattcatgataagtgggctggaattcatcctccactcatcacgtatgcacctgacccactcctgtgctttccatccagtgcctacaggaagcactgattgtgacagagaatccagaggcagcacaggtgagtgagggggtttgcaagggcttcaccaggctgataattgactgagaaaaacagttgttagcatgcacaagttctggatgatacattggaaacccaagtaacgtcagatgcctgagcgggctggcaaggc

SEQ ID NO: 2612 - DNA, 495 bp, Artificial Sequence
  source: /note="Description of Artificial Sequence: Synthetic polynucleotide"
gcctccctcgcgccatcagaagtaacggtgtagcatcagctcagccaaaaccctgcggctggtagggggcctgtggggctgggggctgatgtggctgcggtctccagggcgggtcgggtccaggggcccccagcagtcgacaagtaacggtgtagcatcaacagtaatacaaaccatgtcctcagatgtcacagagctcaggtatagtcaaaattgtttcttggatgaatctctggagaaggagagttggctctgcagagatggatcatcgtgtgtgtcacccttgcaatgtgttcctgacagcccatggaagcgggctagtggattcagctccagcagtaactgttggttgggatggacaacccagaaatggggcatgtgaggaagagaaaatgaaagtggatagcctgttaccgaaaactgctggactaagacacttgtaagcctgtcaatctcagtgaagtaacggtgtagcactgagcgggctggcaaggc

SEQ ID NO: 2613 - DNA, 495 bp, Artificial Sequence
  source: /note="Description of Artificial Sequence: Synthetic polynucleotide"
gcctccctcgcgccatcagaagtaacgtggcagtttcagctcagccaaaaccctgcggctggtagggggcctgtggggctgggggctgatgtggctgcggtctccagggcgggtcgggtccaggggcccccagcagtcgacaagtaacgtggcagtttcacagccaagatatggaaactaagtgtctgtcaatgggcaaatggataaagacaatgtggtatgtgtacacaacatagcattattatgccttataaaataaggaaatgctgccattttccacaagacaaatggactcccaccaccactagcaatggattttatccattgcagcccctccctgagagccggcagatccaggtccactagtaaggactggttgtgacggagtggccagtaacagtgtaggtgaggcagagggtaagtgtgtgctattcaggtccagggctgactcctgcagctgaagtaacgtggcagttctgagcgggctggcaaggc

SEQ ID NO: 2614 - DNA, 495 bp, Artificial Sequence
  source: /note="Description of Artificial Sequence: Synthetic polynucleotide"
gcctccctcgcgccatcagaagtaacgcagtccaatcagctcagccaaaaccctgcggctggtagggggcctgtggggctgggggctgatgtggctgcggtctccagggcgggtcgggtccaggggcccccagcagtcgacaagtaacgcagtccaatcagtgtaaaaattcatggttgtgtactcgttgctcaggtagctcagctgtagaagaaactgtgttttggatgtggatctggagatggtgactggactcttgaggcgtgggttgcgttgtgttctccctcatgacctgtgcacctgattcactccagtcccttccctggggagctgagggatccagctccagcaggaagcactggttgtgatggagaagcagagacagcacagatgagggagagggtctgtgagggcttcgccaggccaagaacgcacgagaaatacagatgtcggcatgcacaagtaacgcagtccaactgagcgggctggcaaggc

SEQ ID NO: 2615 - DNA, 495 bp, Artificial Sequence
  source: /note="Description of Artificial Sequence: Synthetic polynucleotide"
gcctccctcgcgccatcagaagtaacggtgtctactcagctcagccaaaaccctgcggctggtagggggcctgtggggctgggggctgatgtggctgcggtctccagggcgggtcgggtccaggggcccccagcagtcgacaagtaacggtgtctactcaagtaatacaaggttgtggcattgttggtcacagaactcagctaaaagaaaatttggttcttggacgtggatctggagatggtgactgagctcatgaggagtgggttagaatttgtgctccctcgtgacctatgccctgatccactcccttgactgaggactggcggatccagctccagcaggaagcactagttgtgatggagaatccagagacagcacaggtgagggagggggtctgtgagggcctcaccaggccaataaatgaccatgaaacacagtggttggtgtgcatggcttctggaagtaacggtgtctacctgagcgggctggcaaggc

SEQ ID NO: 2616 - DNA, 495 bp, Artificial Sequence
  source: /note="Description of Artificial Sequence: Synthetic polynucleotide"
gcctccctcgcgccatcagaagtaacggtacagtgtcagctcagccaaaaccctgcggctggtagggggcctgtggggctgggggctgatgtggctgcggtctccagggcgggtcgggtccaggggcccccagcagtcgacaagtaacggtacagtgtcataaaaatacatggctgtgtgcttgtgactcacttagctcggctgtaggaagaactgctttttggacatggatctggagatggtgactggactcttgaggagtgggttggaatgtgcactccctcatgacctgtgcactggattcactccagtcccttcctggggggtttatgaatgcagctacagcaggaagcactggttgtgatggggaatccagagacagcacaggtgagggagagggtctgtgagggcttcaccaggccaagtgggcactgagaaacacagttgttggcatgcacagaagtaacggtacagtgctgagcgggctggcaaggc

SEQ ID NO: 2617 - DNA, 495 bp, Artificial Sequence
  source: /note="Description of Artificial Sequence: Synthetic polynucleotide"
gcctccctcgcgccatcagaagtaacgggatcatctcagctcagccaaaaccctgcggctggtagggggcctgtggggctgggggctgatgtggctgcggtctccagggcgggtcgggtccaggggcccccagcagtcgacaagtaacgggatcatctcatttaaaacatggctgtgagcttgttgctcacatagctccactgtaaaaacaagtgttttttggacccgaatttggagatggtgactggattcataaggagtgggtgggaatttttgctcccttcatgacgtgtgcgcctggtccactccagtccttcccatgtggactcgtggatccagctccagcaggaaacactggttgtgatggaaaatccagagacagcacaggtgagggagagggtctgcgagggctccaccaggccaagagtgcactaagaaacacagttgtttgtgagcacagaagtaacgggatcatcctgagcgggctggcaaggc

SEQ ID NO: 2618 - DNA, 495 bp, Artificial Sequence
  source: /note="Description of Artificial Sequence: Synthetic polynucleotide"
gcctccctcgcgccatcagaagtaacgtattggcgtcagctcagccaaaaccctgcggctggtagggggcctgtggggctgggggctgatgtggctgcggtctccagggcgggtcgggtccaggggcccccagcagtcgacaagtaacgtattggcgtcatgaaaaatatatggctatgtgattgttgctcatgtagctcagctgtaggaagaactgtttttggacatggatctggggatggtgactggactcttgaggaaaggggagtaatgtgtgctcccttcatcatctatggacccaatccactccattccctcccagagagggggtgatggatgcagatccaggaggaagcactggttgtgatggagaatgcagagatgacacacatgagggagagggtctttgggggcttcaccaggccaagagtgcaccgagaaacacagttgttggcaggcaaagtaacgtattggcgctgagcgggctggcaaggc

SEQ ID NO: 2619 - DNA, 495 bp, Artificial Sequence
  source: /note="Description of Artificial Sequence: Synthetic polynucleotide"
gcctccctcgcgccatcagaagtaacgaggcttgatcagctcagccaaaaccctgcggctggtagggggcctgtggggctgggggctgatgtggctgcggtctccagggcgggtcgggtccaggggcccccagcagtcgacaagtaacgaggcttgatcaattaaaattcatggttgtgtacttgttgctcaggtagctcagctacaggaaacactgttttttggatgtggatctggagatagtgactggactcttgaggagtgggttggaatgtgcactccctcatgacctgtgcacctgattcgctccagtcccttccttgcggggggtgatggatgcagctccagcaggaagcactggttgtgatggagaatgcagagacagcacaggtgagagagagggtctgtgagagcttcactagcccaagagtgcaggagaaacacagttgttggcatgcacaagtaacgaggcttgactgagcgggctggcaaggc

SEQ ID NO: 2620 - DNA, 495 bp, Artificial Sequence
  source: /note="Description of Artificial Sequence: Synthetic polynucleotide"
gcctccctcgcgccatcagaagtaacgacacacgttcagctcagccaaaaccctgcggctggtagggggcctgtggggctgggggctgatgtggctgcggtctccagggcgggtcgggtccaggggcccccagcagtcgacaagtaacgacacacgttcagcttaaaaatacatggctatgtgcttgttgctcatgtagctcagctgtaggaagaactgcttttttggacacggatctggggatggtgactggacacttgaggagtgggtggtaatgtgtgctcccttcatgacctatgcacccaatccactccattcccttccctggggggctgatggatccagcttcagcaggaagacctcgttatcacggggaacacagacacagcgcaggtaagggagagggtctgtgagggcttcaccaggccaagagtgcgctgagaaacacagttgttggcataagtaacgacacacgtctgagcgggctggcaaggc

SEQ ID NO: 2621 - DNA, 495 bp, Artificial Sequence
  source: /note="Description of Artificial Sequence: Synthetic polynucleotide"
gcctccctcgcgccatcagaagtaacgtagacggatcagctcagccaaaaccctgcggctggtagggggcctgtggggctgggggctgatgtggctgcggtctccagggcgggtcgggtccaggggcccccagcagtcgacaagtaacgtagacggatcaagtaatacatgaccttgtccttggctttcagattggtcattgtaaggcagactgcacttaaaagggtgttgcttgagattgttaatttatttgtactcatggaaagtaaccctgagaattcatacttgatcactcactgttggcacccacacctatccctgttgtgaagcgtgctggaccaagctcatgctgtaaccagtaaaggtgaaaccagaggctttgcaggagagtctcaccactgggctgtaaattttttccccctctgactccatcagtaaacttcacacaggacttccgtgaaagtaacgtagacggactgagcgggctggcaaggc

SEQ ID NO: 2622 - DNA, 495 bp, Artificial Sequence
  source: /note="Description of Artificial Sequence: Synthetic polynucleotide"
gcctccctcgcgccatcagaagtaacggagcgatatcagctcagccaaaaccctgcggctggtagggggcctgtggggctgggggctgatgtggctgcggtctccagggcgggtcgggtccaggggcccccagcagtcgacaagtaacggagcgatatcaagtaatacactgcctactcctcagctttccagtagataattttaagggagattgtgatgttaagtgttgtccccaggaactgtgaatcttctttgtgctggagcagagcaccactgagaacttccacttgggtcactcatggctaccacccactccagcccctctcctccagccatcagggcccaataaatgctgcagtcagtgaaggtgaatcttgatgctttgcagaagaagctaagagaatagccaggctattttgccaaagacaaaaatatagatccagtaaacctttgtggttttaagtaacggagcgatactgagcgggctggcaaggc

SEQ ID NO: 2623 - DNA, 495 bp, Artificial Sequence
  source: /note="Description of Artificial Sequence: Synthetic polynucleotide"
gcctccctcgcgccatcagaagtaacggcatctgatcagctcagccaaaaccctgcggctggtagggggcctgtggggctgggggctgatgtggctgcggtctccagggcgggtcgggtccaggggcccccagcagtcgacaagtaacggcatctgatcaagtaatacacggacttttcctgagctctcaggttaatcatcttaaaagagaatctcctgaactgagtgtatttgaggattgttaatcatctttttactcaaggagagtcccactgagaacttctatttgaattattgttattacccacacccacccctgtcatgaagcctgctggatcaagcttatgctgttttcagtgaaagtgaatccagaggctttgcagaaaaggcagaattcctggtctgtagtatttctctgtctaactccattagttaacttcacaggggacttctgaaaacaaagtaacggcatctgactgagcgggctggcaaggc

SEQ ID NO: 2624 - DNA, 495 bp, Artificial Sequence
  source: /note="Description of Artificial Sequence: Synthetic polynucleotide"
gcctccctcgcgccatcagaagtaacgtgctacactcagctcagccaaaaccctgcggctggtagggggcctgtggggctgggggctgatgtggctgcggtctccagggcgggtcgggtccaggggcccccagcagtcgacaagtaacgtgctacactcaagtattacaaggccttgtccttgactttcagtttggtccctttaaggtagactgcacatgaaaaggtgtcgcttgggactgttaatttatttgtactcatggagagtaactctgagaactcccacttgatcactcactgtttccacccacaccaatccctgtcatgaagcctgctggaccaagctcatgctgtagccagtaaaggtgaaatcagaggctttgcatgagagtctcagtgaaccactgggctgtacaattttcccccctgactctatcagtaaatttcacacaggacttctgaagtaacgtgctacacctgagcgggctggcaaggc

SEQ ID NO: 2625 - DNA, 495 bp, Artificial Sequence
  source: /note="Description of Artificial Sequence: Synthetic polynucleotide"
gcctccctcgcgccatcagaagtaacgaactgccatcagctcagccaaaaccctgcggctggtagggggcctgtggggctgggggctgatgtggctgcggtctccagggcgggtcgggtccaggggcccccagcagtcgacaagtaacgaactgccatcactgtaatatacggccttgcccttggctttcaggttggtccttgtaaggtagactgcacttgaaagggtgtcacttgggaatgttgatttatctgtactcatggagagtaacccttagaactcccatatgatctctcactgttgctacccacaccaattcctgttgtgaagcgtgctggaccaagctcatgctgcacccagtaaacccgaaaccagaggctttgcaggacagtctcagtgaactgctgggctgttaaatttttctccttctgactccatcagtaaacatcacacaggacttaagtaacgaactgccactgagcgggctggcaaggc

SEQ ID NO: 2626 - DNA, 495 bp, Artificial Sequence
  source: /note="Description of Artificial Sequence: Synthetic polynucleotide"
gcctccctcgcgccatcagaagtaacgttggactgtcagctcagccaaaaccctgcggctggtagggggcctgtggggctgggggctgatgtggctgcggtctccagggcgggtcgggtccaggggcccccagcagtcgacaagtaacgttggactgtcaagtaatacacagacttgtcttgggctctcagttttattatcttaaaagagaatcttctgaacagtgtctctgaggactgttaatcttctttgtactgaaggcgagtcccattgagaacttccacttgaattactgttatctccctcaccaacacttgccatgaatcctgctggaccaaacttgttcttttttcagtgaatccaggggctttgcagaacagtctgagaattcttggtctgtagtattttcctgtctgactccactagttaacttcacagaggacttctgcacacacagaggaagtaacgttggactgctgagcgggctggcaaggc

SEQ ID NO: 2627 - DNA, 495 bp, Artificial Sequence
  source: /note="Description of Artificial Sequence: Synthetic polynucleotide"
gcctccctcgcgccatcagaagtaacgtcggtacttcagctcagccaaaaccctgcggctggtagggggcctgtggggctgggggctgatgtggctgcggtctccagggcgggtcgggtccaggggcccccagcagtcgacaagtaacgtcggtacttcacagtaataaacggaattttcctgagctctcaggttaatcatcttaagagagaatcatctgaaaagcgtgtctctgaggactgttaatcttctttgtactcaaggagagtcccactgagaacttccacttgaattactgatgttatcacctacacccacccctgtcatgaagcctgctggaccaagcttatgctgttttcagtgaaagtgaatccacagggtttccagaaaagtctgagaattcttggtctgtagtatttctctgagagactccagtaattaacttcacaggggacctctgaagtaacgtcggtactctgagcgggctggcaaggc

SEQ ID NO: 2628 - DNA, 495 bp, Artificial Sequence
  source: /note="Description of Artificial Sequence: Synthetic polynucleotide"
gcctccctcgcgccatcagaagtaacgccatggattcagctcagccaaaaccctgcggctggtagggggcctgtggggctgggggctgatgtggctgcggtctccagggcgggtcgggtccaggggcccccagcagtcgacaagtaacgccatggattcacacagttaaatgctgccatgttctgggttctcaggctgttcatttgcatgtacagcatgtacttggtgttgtctctggaagtggtgagtctgcccctaacatagtctgcattgtattgatgactttcactacgccatataactgcaacccattccagccccttccctgaggcctggcaaacccagtgaatctcatagatactgaaggtgaaccaagaggctgcacaggagagcctcaggggcccctctcagtgtaccaagtctcccccagactctgtaagctgggcctcaccctggatacaagtaacgccatggatctgagcgggctggcaaggc

SEQ ID NO: 2629 - DNA, 495 bp, Artificial Sequence
  source: /note="Description of Artificial Sequence: Synthetic polynucleotide"
gcctccctcgcgccatcagaagtaacgacgaagattcagctcagccaaaaccctgcggctggtagggggcctgtggggctgggggctgatgtggctgcggtctccagggcgggtcgggtccaggggcccccagcagtcgacaagtaacgacgaagattcacagtaatacactgcctacccctgtgagagccccctcagcttccaagtagattattttaagggagactgtgctggtaattggtgtccctgggaattgtgaatcttcattatgctgatgcagaatatcactgagaacttccacttgaatcaatcactgttaccacccactccagcctctgtcccccagccatctgggctcaatttatgctgtagtcagtgaaggtgaatcttgatgctttgcaaaagaggctaagagaacagccaggctgttttgccaaagataaaaatatagatccagtaaaagtaacgacgaagatctgagcgggctggcaaggc

SEQ ID NO: 2630 - DNA, 495 bp, Artificial Sequence
  source: /note="Description of Artificial Sequence: Synthetic polynucleotide"
gcctccctcgcgccatcagaagtaacgactgtggatcagctcagccaaaaccctgcggctggtagggggcctgtggggctgggggctgatgtggctgcggtctccagggcgggtcgggtccaggggcccccagcagtcgacaagtaacgactgtggatcaacagtattacacaaccttgtccttggctttcaggttagtcattgtaaggtagagtgcacgtgaaagggtgtcgctggaccagttaatttatttgtactcatgaagagtaaacctgagcactcccacttgttgactcactgttgccagccaccacaatccctgttgtgaagcctgctggaccaacctcaggctgttgccagaaaaggtgaatccagacgctttgcaagaaagtctcagtgaaccactgggctgtactacgtttacccctctgactccaccactgaacttcatacaggacttaagtaacgactgtggactgagcgggctggcaaggc

SEQ ID NO: 2631 - DNA, 495 bp, Artificial Sequence
  source: /note="Description of Artificial Sequence: Synthetic polynucleotide"
gcctccctcgcgccatcagaagtaacgggtgtcattcagctcagccaaaaccctgcggctggtagggggcctgtggggctgggggctgatgtggctgcggtctccagggcgggtcgggtccaggggcccccagcagtcgacaagtaacgggtgtcattcaagtaatacatggccttctcctcggctctcaggttggtcattttgagggagactgtgctgacaagggtgtccctgaggattatgatttttctttgtattgatggagggtaccactaacaaattccacttgaatccctcgcttttgcctcccacaccaacccctgtcctgaagcctgctgggctgagctcatgctagagtcaatgaaggtaaattcagaggctttgtaaaaaaggctctgagaacagttaggctgtatcatttctcttccagattccaccagtgaacttcttgtaggactctaagtaacgggtgtcatctgagcgggctggcaaggc

SEQ ID NO: 2632 - DNA, 495 bp, Artificial Sequence
  source: /note="Description of Artificial Sequence: Synthetic polynucleotide"
gcctccctcgcgccatcagaagtaacgtcgtgaagtcagctcagccaaaaccctgcggctggtagggggcctgtggggctgggggctgatgtggctgcggtctccagggcgggtcgggtccaggggcccccagcagtcgacaagtaacgtcgtgaagtcacagtaatacaaggtcttgtccttggctttcacattggtcattttaaggtagactgcacttgaaagggtgttgcttgggactgttaatttacttgtactcatggagagtaaccctgataactcactgttgccacccacacaaatccctgtcatgaagcctgctggaccaagctcatgctgtagccagtacaagtgaaatcagaggctttgcaggagagtctgtgagaaccgctgggctgtacaatgtttccccctctgactccatcagtaagcttcaacaggacttacatgaacacagaggaagtaacgtcgtgaagctgagcgggctggcaaggc

SEQ ID NO: 2633 - DNA, 495 bp, Artificial Sequence
  source: /note="Description of Artificial Sequence: Synthetic polynucleotide"
gcctccctcgcgccatcagaagtaacgcactagcttcagctcagccaaaaccctgcggctggtagggggcctgtggggctgggggctgatgtggctgcggtctccagggcgggtcgggtccaggggcccccagcagtcgacaagtaacgcactagcttcacacagtaatacacgcctgcatccccagccatcacacttctcagctgtaagttttcttgttttttactatgtgtttctggagatgctagctctgccctgaaggttggggcttagtgtttcccttaacccatatcacaccaacacactgaagaccttttgatgggagatggtggatccaggaaacagaatgttcagaaattgaatgtgcataggcggcataggtgaggctgagcatgaccaaggggaccactacttcttcctcccattgcacaaggtggtcctcactgtgaacccctgagaaaagtaacgcactagctctgagcgggctggcaaggc

SEQ ID NO: 2634 - DNA, 495 bp, Artificial Sequence
  source: /note="Description of Artificial Sequence: Synthetic polynucleotide"
gcctccctcgcgccatcagaagtaacgggtcaacttcagctcagccaaaaccctgcggctggtagggggcctgtggggctgggggctgatgtggctgcggtctccagggcgggtcgggtccaggggcccccagcagtcgacaagtaacgggtcaacttcagcacagtagtacacatctatgtcctcagatctctgactgctcagctccatgtaggctgtgctcgtggacgtgtccctggtcatggtgactctgccctgaaacttctgtgcatagcctgtgttaccattgccagagtagctccctaccatccattcaaacccttatccaggggcctgtcacacacagtgaatgtcgtagctggcgaaggtgtatccagagctttgcaggagaccttcactgaggccatggacgctggcaacaggagagtcatcagaagctgggtgagtcatataatcaggaaagtaacgggtcaactctgagcgggctggcaaggc

SEQ ID NO: 2635 - DNA, 495 bp, Artificial Sequence
  source: /note="Description of Artificial Sequence: Synthetic polynucleotide"
gcctccctcgcgccatcagaagtaacgtacgtacgtcagctcagccaaaaccctgcggctggtagggggcctgtggggctgggggctgatgtggctgcggtctccagggcgggtcgggtccaggggcccccagcagtcgacaagtaacgtacgtacgtcaacaggaatacacgaccatgtcttcagatctcaggctgctcagctccatgtaggctgtgctcacggacctgtcactggtaatggtgactctgccccggaacttctgtgcgtagtgtgtgttatcattgtaagggttgatgcatcccaaccactatgcccttgtccagggccctgtcgcacccactgtgtaaagtatttggtgaaggtgtatctggaagcctggccaggagaccttcactgaggacgcaggcttcttcacctcagccccaggctgcaacagctgaacctgggaatggacatcaagtaacgtacgtacgctgagcgggctggcaaggc

SEQ ID NO: 2636 - DNA, 495 bp, Artificial Sequence
  source: /note="Description of Artificial Sequence: Synthetic polynucleotide"
gcctccctcgcgccatcagaagtaacgatgacacctcagctcagccaaaaccctgcggctggtagggggcctgtggggctgggggctgatgtggctgcggtctccagggcgggtcgggtccaggggcccccagcagtcgacaagtaacgatgacacctcacacagtaatacatggccgtgtcttcagatctcaggctgctcagctccatgtaggctgtgctcgtggatgtgtccctggtcatggtgactctgccctggaacttctctgcgtagcttatgctgccatcactagggcacatccttcccatccactcaagcccttgtgcatgggcctggcgcacctagtgcatagagtaactggtgaaggtaggtgtatccacaagtcttgcaggagactttcactgatgccccagccttcttcatctcatccccagactgcaccagctgcacctgggactggaagtaacgatgacaccctgagcgggctggcaaggc

SEQ ID NO: 2637 - DNA, 495 bp, Artificial Sequence
  source: /note="Description of Artificial Sequence: Synthetic polynucleotide"
gcctccctcgcgccatcagaagtaacgcttcacgatcagctcagccaaaaccctgcggctggtagggggcctgtggggctgggggctgatgtggctgcggtctccagggcgggtcgggtccaggggcccccagcagtcgacaagtaacgcttcacgatcacccagtaatacacagccgagtcctcagatctcaggctgctcagctctatgtaggctgtcctcagggacatgtccctggtaatggtgactctgccctggaacttctttgcatagttggtgttaccattgtaaagtgtgatccatctcatcctttcaagcccttgtccaggggcctgttgcaaccagtgcaaggagcagcaagtgaaggtgtatccggaagccttgcaggagaccttcactgaggccccaggcttctttacctcagcctcagactgccccagctgcacctgggagcagacacaagtaacgcttcacgactgagcgggctggcaaggc

SEQ ID NO: 2638 - DNA, 495 bp, Artificial Sequence
  source: /note="Description of Artificial Sequence: Synthetic polynucleotide"
gcctccctcgcgccatcagaagtaacgagaatcagtcagctcagccaaaaccctgcggctggtagggggcctgtggggctgggggctgatgtggctgcggtctccagggcgggtcgggtccaggggcccccagcagtcgacaagtaacgagaatcagtcacacagtaatacacgaccatgtcttcagatctcaggctgctcagctccatgtaggctgtgctcatggacctgtcactggtaatggtgactctgccccagaacgtctgtgcatagtgtgtgttatcattgtaagggttgattcatcccatccactatgcccttgtccagggctttgtcacacccaccgtgtaaagtatttggtgaaggtgtatctggaagcctggcaggagaccttcactgaggacccaggcttcttcacctcagccccaggctgcaacagctgaacctgggaatggacaccaagtaacgagaatcagctgagcgggctggcaaggc

SEQ ID NO: 2639 - DNA, 495 bp, Artificial Sequence
  source: /note="Description of Artificial Sequence: Synthetic polynucleotide"
gcctccctcgcgccatcagaagtaacgagttatgctcagctcagccaaaaccctgcggctggtagggggcctgtggggctgggggctgatgtggctgcggtctccagggcgggtcgggtccaggggcccccagcagtcgacaagtaacgagttatgctcatgcacagtaatgtgtggctgtgtccacaatgtccatgttgatcactgttagaaccacttcattcttggaggtgtccttggagataatgagcctactcttcagagatgggctgtagtatttattatcattctaataaatgtgtgcaagccactccagggcctttgctgagggctgacagatctaacccacacccattccagaagtgctgagtgagaacccagagaaggtgcaggtcagcatgagggtctgtgtgggtttcaccagtgcaggaccagactccttcaaggtgacctgggataaaagtaacgagttatgcctgagcgggctggcaaggc

SEQ ID NO: 2640 - DNA, 495 bp, Artificial Sequence
  source: /note="Description of Artificial Sequence: Synthetic polynucleotide"
gcctccctcgcgccatcagaagtaacgaggtctcatcagctcagccaaaaccctgcggctggtagggggcctgtggggctgggggctgatgtggctgcggtctccagggcgggtcgggtccaggggcccccagcagtcgacaagtaacgaggtctcatcacagagtcatatgcagctgcatcctctgccctcagtctgttcatttgcagatacagtgagtttttggtattgtctctggaaatggtgaatcggcccttcacagagtctgcgtagtacatggtactaccactaccactaataactgggacccactgcagacccttccctggagcctgggggacccagtgcgtgctatggctactgaaggtgaatccagaggctgcacaggagagtctcagggacacccaggctttgtcaagtttgctccagactctaccagctgcatctcacactggacaccaagtaacgaggtctcactgagcgggctggcaaggc

SEQ ID NO: 2641 - DNA, 495 bp, Artificial Sequence
  source: /note="Description of Artificial Sequence: Synthetic polynucleotide"
gcctccctcgcgccatcagaagtaacggtcatagttcagctcagccaaaaccctgcggctggtagggggcctgtggggctgggggctgatgtggctgcggtctccagggcgggtcgggtccaggggcccccagcagtcgacaagtaacggtcatagttcacacagtaatacacagccatgtcctcgggcctcaggctgttcatttgctgatacaggaagttcctggaattgtctctggagatgatgaatcggcccttcacagagtctgcatagtgcgtcctactgccattccaactaacacccgatacccactccagcccctttcctggagcctggcggacccagttcatgtcactgttactgaaggtgaatccagaggctgcacaggagagtctcagggaccccccaggctctaccaagcctcccccagactccaccagctgcactgttgtacccaggtaagtaacggtcatagtctgagcgggctggcaaggc

SEQ ID NO: 2642 - DNA, 495 bp, Artificial Sequence
  source: /note="Description of Artificial Sequence: Synthetic polynucleotide"
gcctccctcgcgccatcagaagtaacggtgacttgtcagctcagccaaaaccctgcggctggtagggggcctgtggggctgggggctgatgtggctgcggtctccagggcgggtcgggtccaggggcccccagcagtcgacaagtaacggtgacttgtcaacagtaatacacggccgtgtcctcggttttcaggctcttcatttgcagataggtgatgcttttggaatcatctcttgagattgtgaatctgcctttcacagacgtggtctattctgttgtcccaccattagctttgtttctaatgaaacctacccattccagccccttcccgggagcctggcggaccccgctcatgtagtagtaactgaaggtgaatccagaggctgcacaggagagtctcagggaccccccaggctgtaccaagcctcccccagactccaccagctgcacctcacactgaagtaacggtgacttgctgagcgggctggcaaggc

SEQ ID NO: 2643 - DNA, 495 bp, Artificial Sequence
  source: /note="Description of Artificial Sequence: Synthetic polynucleotide"
gcctccctcgcgccatcagaagtaacggattgcagtcagctcagccaaaaccctgcggctggtagggggcctgtggggctgggggctgatgtggctgcggtctccagggcgggtcgggtccaggggcccccagcagtcgacaagtaacggattgcagtcaacactaatagagggccgtgtcctcggttttcaggctgttcatttgcagatgaagtgtgttcttggcgttatctctggaggtattgaatcggtccttaccggagtctatgaggtatgtgctacccccattaggattaacttgtcaaaccaactccagcccattccctggagcctggcggacacagttcatgtagtagctactgaaggtgaattgagaggctgcacaggagagtctcggggaccacgcaggctttgccaagcctcccccagactccaccagctgcatctcacactggataccaagtaacggattgcagctgagcgggctggcaaggc

SEQ ID NO: 2644 - DNA, 495 bp, Artificial Sequence
  source: /note="Description of Artificial Sequence: Synthetic polynucleotide"
gcctccctcgcgccatcagaagtaacgactatgactcagctcagccaaaaccctgcggctggtagggggcctgtggggctgggggctgatgtggctgcggtctccagggcgggtcgggtccaggggcccccagcagtcgacaagtaacgactatgactcatgtacagccatacacagccatgtcctcagttctctgactgttcatttgcagatacagagagttcttagcattgtctttggagatggagaatctgcccttcacagagtctgcatggtgtatctgacttccatcatcttttatatctattactcactccagccccttgcctgcagactggtgaactgggctcattcagaagctactgaaggcgaatctagaggctacacaggagagtctcaggaacttcccaggttgtctcaggtcctctgtgggctctatcagctccacctcacactgaacaagtaacgactatgacctgagcgggctggcaaggc

SEQ ID NO: 2645 - DNA, 495 bp, Artificial Sequence
  source: /note="Description of Artificial Sequence: Synthetic polynucleotide"
gcctccctcgcgccatcagaagtaacgatggtcaatcagctcagccaaaaccctgcggctggtagggggcctgtggggctgggggctgatgtggctgcggtctccagggcgggtcgggtccaggggcccccagcagtcgacaagtaacgatggtcaatcacatacagtaacacacagctgtgcccgctgctctcagactgttcattagcaaatacagtgagttcttggcattttctttggagatggtgaatttgctcttcaaagattatgcataacatatctgacttccatcacactgtatatctactactcactccagccccttccctggagcctgggaaaccgagttccttcagtagctactgaaggttaatccagagtctgcacaggagagtctcagggatcccccaggttgtcttgggtcctctccggactccacgagctgtacctctcactagacaagtaacgatggtcaactgagcgggctggcaaggc

SEQ ID NO: 2646 - DNA, 495 bp, Artificial Sequence
  source: /note="Description of Artificial Sequence: Synthetic polynucleotide"
gcctccctcgcgccatcagaagtaacggatggctttcagctcagccaaaaccctgcggctggtagggggcctgtggggctgggggctgatgtggctgcggtctccagggcgggtcgggtccaggggcccccagcagtcgacaagtaacggatggctttcatgtatagccatacacggccacgtcctcagctctctgagtgttcatttgcagatacagagagttcttagcattgtctttggagatggagaatctgcccttcacagagtctgcatggtgtatctgacttccatcatcttttatatctattactcactccagccccttgcctggagactggtgaactcggctcattcagaagctactgaaggcgaatctagaggctacacaggagagtctcaggaacttcccaggttgtctcaggtcctctatggactctatcagctccacctcacactgaacaagtaacggatggcttctgagcgggctggcaaggc

SEQ ID NO: 2647 - DNA, 495 bp, Artificial Sequence
  source: /note="Description of Artificial Sequence: Synthetic polynucleotide"
gcctccctcgcgccatcagaagtaacgagcatatgtcagctcagccaaaaccctgcggctggtagggggcctgtggggctgggggctgatgtggctgcggtctccagggcgggtcgggtccaggggcccccagcagtcgacaagtaacgagcatatgtcacatacagtaacacacagctgtgccctctgctctcagactgttcatttgcaaatacagtgagttcttggcattttctttggagatggtgaatttgctcttcacagattgggcataacatatctgacttccatcacactgtatatctactactcactccagccccttccctggagcctgggaaaccgagctcattcagtagctactgaaggttaatccagagtctgcacaggagagtctcaaggatcccccaggttgtcttgggtcctctccggactccacgagctgtacctctcactagacaagtaacgagcatatgctgagcgggctggcaaggc

SEQ ID NO: 2648 - DNA, 495 bp, Artificial Sequence
  source: /note="Description of Artificial Sequence: Synthetic polynucleotide"
gcctccctcgcgccatcagaagtaacgcatatgcttcagctcagccaaaaccctgcggctggtagggggcctgtggggctgggggctgatgtggctgcggtctccagggcgggtcgggtccaggggcccccagcagtcgacaagtaacgcatatgcttcaagtaatacacagacctatcctcggctctgacgctgttcatttgcagatacagtgatttcttggcatcatctctggagagggtgaatcgacccttcacagagtctgcatagcttgtgctacctacacaacaactcataaatgagacctactccagccctttcccaggagcctgatggacccagctcatccagtacctaataaaggtactaaaggtgaatccagaggctgcaaaagaaagtctcagggacccccaggctataacaagcctcccaaagactccaccagctgcacctcacactgaagtaacgcatatgctctgagcgggctggcaaggc

SEQ ID NO: 2649 - DNA, 495 bp, Artificial Sequence
  source: /note="Description of Artificial Sequence: Synthetic polynucleotide"
gcctccctcgcgccatcagaagtaacgtcgtcgattcagctcagccaaaaccctgcggctggtagggggcctgtggggctgggggctgatgtggctgcggtctccagggcgggtcgggtccaggggcccccagcagtcgacaagtaacgtcgtcgattcaacacagccgagtcctcatctctcagactgttcatttgcaagtacagcatgttcttgccattgtctctagagatggtgaatctacccttcagtgtctgcatagtataggctaccaccactagcactaatgtatgagacccattccagcccctttcttgaagcccggtgggcccagttcatgtcattgcttctcaagatgaatccgcaggctgcacatgagagtctcaggacacccccaaccccaccacagctgtaccaagtctcccccagactctaccagctgcacctcatactgcacaccaagtaacgtcgtcgatctgagcgggctggcaaggc

SEQ ID NO: 2650 - DNA, 495 bp, Artificial Sequence
  source: /note="Description of Artificial Sequence: Synthetic polynucleotide"
gcctccctcgcgccatcagaagtaacgcagtctgttcagctcagccaaaaccctgcggctggtagggggcctgtggggctgggggctgatgtggctgcggtctccagggcgggtcgggtccaggggcccccagcagtcgacaagtaacgcagtctgttcaagtaatacatggccgtgtccttagctttcagactgtccatttgcagatagagcatgctcttagaattgtctcggagattgtgaatcggcccttcacagagtctgcatagtatttctgacttccatcattccagatatgtgccactcactccagccccttccctggagcctggcggacccagctcatgccatagctactaaaggagaatcctgaggctgcacaggagagtctcagggaccccccaggctggaccaagcctcccccagactccaccagctgcacctcacactggacacctgcaagtaacgcagtctgtctgagcgggctggcaaggc

SEQ ID NO: 2651 - DNA, 495 bp, Artificial Sequence
  source: /note="Description of Artificial Sequence: Synthetic polynucleotide"
gcctccctcgcgccatcagaagtaacgaacgcgtatcagctcagccaaaaccctgcggctggtagggggcctgtggggctgggggctgatgtggctgcggtctccagggcgggtcgggtccaggggcccccagcagtcgacaagtaacgaacgcgtatcagtacagtaatagatggccgtgtactcggttttcagggtattcacttgcagatacagtgtgttctttgaatcatctcttgagatggtgaacctgcctttcacagatgcagcgcattctgtcgtgtaactgttacgtttggttctaatacggccaacccactccagccctttcccagaagcctggcggatccagtgcattcagaagtcactgaaggtgaatctagaagctgcaaatgagagtctcggggacccacccaggctgtaccaagcctcccccagactccaccagctgcgcctcacgaagtaacgaacgcgtactgagcgggctggcaaggc

SEQ ID NO: 2652 - DNA, 495 bp, Artificial Sequence
  source: /note="Description of Artificial Sequence: Synthetic polynucleotide"
gcctccctcgcgccatcagaagtaacggtagttcgtcagctcagccaaaaccctgcggctggtagggggcctgtggggctgggggctgatgtggctgcggtctccagggcgggtcgggtccaggggcccccagcagtcgacaagtaacggtagttcgtcaacaataatacacagccatgtcctcagctatcaggctgttcatttgaagatacaaggacttcttggcgttgtctctggagatggtgaatcggcccatcacggagtctgcatagtatgtatcaccaccagtaccaatagctgatacccactccggacccttccctggagcccggcgaacccagtgcagaacatagctactgaaggcgaatccagaggctgcacaggagggtctcagggaccccccaggctgtaccaagcctcccccagactccaccagctgatcctcacactggacacctgcaagtaacggtagttcgctgagcgggctggcaaggc

SEQ ID NO: 2653 - DNA, 495 bp, Artificial Sequence
  source: /note="Description of Artificial Sequence: Synthetic polynucleotide"
gcctccctcgcgccatcagaagtaacgcgaactactcagctcagccaaaaccctgcggctggtagggggcctgtggggctgggggctgatgtggctgcggtctccagggcgggtcgggtccaggggcccccagcagtcgacaagtaacgcgaactactcatgactcaataatacagagccatattctcagctctcagactgttcatttgcagatacaacctgtgcttggcattgtctttggagatggtgaatctgaccttcacagagtctgcatattatgtctgacttccatcgtacattatatctactactcactgcagcccctttcctggagcctggcagattcagctgatctagtagctacagaaggtggattcagaggatgcacggcagagtctcaggcacattcagcttgtgccaactctccccaagactccaccatctgcaccccacactagacaagtaacgcgaactacctgagcgggctggcaaggc

SEQ ID NO: 2654 - DNA, 495 bp, Artificial Sequence
  source: /note="Description of Artificial Sequence: Synthetic polynucleotide"
gcctccctcgcgccatcagaagtaacgttaacgtctcagctcagccaaaaccctgcggctggtagggggcctgtggggctgggggctgatgtggctgcggtctccagggcgggtcgggtccaggggcccccagcagtcgacaagtaacgttaacgtctcaacagtaatacacggtcatgtcctcagctctcaggctgttcacttgcagatagagggagttcttggcattgtctctggagatggtcaatcggcccttcacagagtctacatagtatttctcacttccgtcacactttatgtcggccacccactccagccccttctccggagcctggcagacccagtgcatccaggagctactgaaggtgaatccagaggctgcacaggagagtctcagggaccctccaggctgtaccaagcctcacccagactccaccagctgcacctcacactggacaccaagtaacgttaacgtcctgagcgggctggcaaggc

SEQ ID NO: 2655 - DNA, 495 bp, Artificial Sequence
  source: /note="Description of Artificial Sequence: Synthetic polynucleotide"
gcctccctcgcgccatcagaagtaacgagcaaccttcagctcagccaaaaccctgcggctggtagggggcctgtggggctgggggctgatgtggctgcggtctccagggcgggtcgggtccaggggcccccagcagtcgacaagtaacgagcaaccttcacatacagtaatacacggccgtgccctctgctctcagactgttcatttgcaaacagagtgagttcttggcattttctttggagatggtgaatctgctcttcacagattgtgcataacatagctgacttctatcctactatatatctactactcactccagccccttccctggagcctgggaatctgagctcattcagtagctactgaaggttaatccagagtctgcacaggagagtctcagggatcccccaagttgtctttggttttcttcagactccaccagctgtacctcacactggacaagtaacgagcaacctctgagcgggctggcaaggc

SEQ ID NO: 2656 - DNA, 495 bp, Artificial Sequence
  source: /note="Description of Artificial Sequence: Synthetic polynucleotide"
gcctccctcgcgccatcagaagtaacgttctcgagtcagctcagccaaaaccctgcggctggtagggggcctgtggggctgggggctgatgtggctgcggtctccagggcgggtcgggtccaggggcccccagcagtcgacaagtaacgttctcgagtcaacagtaatacacagccttgtccttggctttcaggttggtcattgtaaggtagactgcacatgaaaaggtgtcgcttgggactgttaatttatttgtactcatggagagtaactctgagaactcccacttgatcactcactgtttccacccacaccaatccctgtcatgaagcctgctggaccaagctcatgctgtagccagtaaaggtgaaatcagaggctttgcaggagagtctcagtgaaccactgggctgtacaattttctgcctctgactccatcaataaacttcacacaggacttaagtaacgttctcgagctgagcgggctggcaaggc

SEQ ID NO: 2657 - DNA, 495 bp, Artificial Sequence
  source: /note="Description of Artificial Sequence: Synthetic polynucleotide"
gcctccctcgcgccatcagaagtaacgactctacgtcagctcagccaaaaccctgcggctggtagggggcctgtggggctgggggctgatgtggctgcggtctccagggcgggtcgggtccaggggcccccagcagtcgacaagtaacgactctacgtcaacacagtaatacacagccatgtcgtcggctctcaggctgttcatttgcagatacagtgaattctgggcattgtctctagagatggtgaatcagcccttcacagagtctgtgtagagtacggtatcaccacttgtactaataactgagacccactccaaaccctttcctggagcctggtggacccagtgcatagcagagctactgaaggtgaatccagaggctgcacaggagagtctcagagaccctcccagtctttactaagcctcccccagactccaccagctgcacctcacactggacaagtaacgactctacgctgagcgggctggcaaggc

SEQ ID NO: 2658 - DNA, 495 bp, Artificial Sequence
  source: /note="Description of Artificial Sequence: Synthetic polynucleotide"
gcctccctcgcgccatcagaagtaacgtaccggaatcagctcagccaaaaccctgcggctggtagggggcctgtggggctgggggctgatgtggctgcggtctccagggcgggtcgggtccaggggcccccagcagtcgacaagtaacgtaccggaatcaacagtagtacacaactgtgccctcggctctcaggctgttcatttgcagagacagtgaattctgggcattgtctctggagatggtgaatcggcccttcacagagtctgtgtagagtacggtatcaccacttgtactaataactgagacccactacaaaccctttcttggagcctggcggacccagtgcatagcagagctactgaaggtgaatccagaggctgcacaggagagtctcagggaccccccaggctggaccaagccttccccagactccaccagctgcacctcacactggacaccaagtaacgtaccggaactgagcgggctggcaaggc

SEQ ID NO: 2659 - DNA, 495 bp, Artificial Sequence
  source: /note="Description of Artificial Sequence: Synthetic polynucleotide"
gcctccctcgcgccatcagaagtaacgcgaattgctcagctcagccaaaaccctgcggctggtagggggcctgtggggctgggggctgatgtggctgcggtctccagggcgggtcgggtccaggggcccccagcagtcgacaagtaacgcgaattgctcatgtacagccatgcatggtcatgtcctcagctctcagactgttcgtttggagatacggtgagttcttagcattgtctttggagatggtgaatctgcccttcacagagtctgcatggtatatctgacttccatcatattttacatctattactccctccagccccttccctagagtctcattgacccagctcattcagtagctactgaaggtgaatccagaggctacacaggagagtctcaggaacttcccaagttgtctcaggccctctatggactctatcagctccacctcacactgaacaagtaacgcgaattgcctgagcgggctggcaaggc

SEQ ID NO: 2660 - DNA, 495 bp, Artificial Sequence
  source: /note="Description of Artificial Sequence: Synthetic polynucleotide"
gcctccctcgcgccatcagaagtaacgttcgctcatcagctcagccaaaaccctgcggctggtagggggcctgtggggctgggggctgatgtggctgcggtctccagggcgggtcgggtccaggggcccccagcagtcgacaagtaacgttcgctcatcagtatagtaatacacggccgtgtcctcggttttcaggctgttcatttgcagataggcgatgcttttggaatcatcgcttgagatggtgaatctgcctttcacagacgcggcgtattctgttgttccacgattagttttgtttttagtgaaacctacccactccagcccctttcctggagcccggcagatccactgcatgcagtagttaacggaaggtgaatccagaggctgcacaggagagtctcagggaccccccaggctgtaccaagcctcccccagactccaccagctgcacctcacaaagtaacgttcgctcactgagcgggctggcaaggc

SEQ ID NO: 2661 - DNA, 495 bp, Artificial Sequence
  source: /note="Description of Artificial Sequence: Synthetic polynucleotide"
gcctccctcgcgccatcagaagtaacggacgttaatcagctcagccaaaaccctgcggctggtagggggcctgtggggctgggggctgatgtggctgcggtctccagggcgggtcgggtccaggggcccccagcagtcgacaagtaacggacgttaatcaacagtaatacacggccgtgtcctcggctctcaggctgttcatttgcagataggtgatgcttttggaatcatctcttgagattgtgaatctgcctttcacagacgtggtctattctgttgtcccaccattagctttgtttctaatgaaacctacccactccagccccttcccgggagcctggcggacccagctcatgtagtagtcactgaaggtgaatccagaggctgcacaggagagtctcagggaccccccaggctggaccaagcctcccccggactccaccagctgcacctcacactgaagtaacggacgttaactgagcgggctggcaaggc

SEQ ID NO: 2662 - DNA, 495 bp, Artificial Sequence
  source: /note="Description of Artificial Sequence: Synthetic polynucleotide"
gcctccctcgcgccatcagaagtaacgcgtagagttcagctcagccaaaaccctgcggctggtagggggcctgtggggctgggggctgatgtggctgcggtctccagggcgggtcgggtccaggggcccccagcagtcgacaagtaacgcgtagagttcacacagtaatacgtggctgtgtactcagctctcaaactgttcatttccagataagagtgtgttcttggcattgtttctggagatggggaatcagaacttcccagaatgtgcatagcgtatgctactcccatcagtactaatacatgagacccactccagtctgttccctggagcctggcaggcccagtgcatccagtggctactgaaggcaaatccagaggctgcacaggacagtctcagggacccccacccccaccgcgccaggctgtaccaagtctcccccaggctccaacaactgcgcaagtaacgcgtagagtctgagcgggctggcaaggc

SEQ ID NO: 2663 - DNA, 495 bp, Artificial Sequence
  source: /note="Description of Artificial Sequence: Synthetic polynucleotide"
gcctccctcgcgccatcagaagtaacgttccggtatcagctcagccaaaaccctgcggctggtagggggcctgtggggctgggggctgatgtggctgcggtctccagggcgggtcgggtccaggggcccccagcagtcgacaagtaacgttccggtatcacagtaatagacggccatggtgtcagcaatgaaactgtttatttgcagatacagtgagttcttggtgttttctctggagatggtcaaccggcccttcacagagtctgagtagtatatgcctccaccactagcattaatgtaagacccactccagtcccttccctggagcttggtccacctagtgcatgccatagttactgaaagtgtatccagaggctgcacaggagagtcacatggaccccccaagctgtaccaagcctcccccagactctaccagctacacttcacattggacacctgcaagtaacgttccggtactgagcgggctggcaaggc

SEQ ID NO: 2664 - DNA, 495 bp, Artificial Sequence
  source: /note="Description of Artificial Sequence: Synthetic polynucleotide"
gcctccctcgcgccatcagaagtaacggcaattcgtcagctcagccaaaaccctgcggctggtagggggcctgtggggctgggggctgatgtggctgcggtctccagggcgggtcgggtccaggggcccccagcagtcgacaagtaacggcaattcgtcacatacagtaacacacagctgtgccctctgctctcagactgttcatttgcaaatacagtgagttcttggcattttctttggagacggtgaatctgctcgtcacagattgtgcataacatatctgacttccatcacactgtatatctactactcactccagccccttccctggagcctgggaaaccgagctcattcagtagctactgaaggttaatccagaggctgcacaggagagtctcagggaacccaggttgtcttgggtcctctccagactccaccagctgtacctcacactggacacaagtaacggcaattcgctgagcgggctggcaaggc

SEQ ID NO: 2665 - DNA, 495 bp, Artificial Sequence
  source: /note="Description of Artificial Sequence: Synthetic polynucleotide"
gcctccctcgcgccatcagaagtaacgtgagcgaatcagctcagccaaaaccctgcggctggtagggggcctgtggggctgggggctgatgtggctgcggtctccagggcgggtcgggtccaggggcccccagcagtcgacaagtaacgtgagcgaatcaacagtaatacacagccgtgtcctcggctctcaggctgttcatttgcagatacagtgagttcttggcgttgtctctggagatggtgaatcggcccttcacagagtctgcgtagtatatggtactactactactaatggatgagacccactccagccccttccctggagcctggcggacccagttcatgtagtagtcactgaaggtgaatccagaggctgcacaggagagtctcagggaccccccaggctttaccaagcctcccccagactccaccagctgcacctcacactggacacctgcaagtaacgtgagcgaactgagcgggctggcaaggc

SEQ ID NO: 2666 - DNA, 495 bp, Artificial Sequence
  source: /note="Description of Artificial Sequence: Synthetic polynucleotide"
gcctccctcgcgccatcagaagtaacgtactaagctcagctcagccaaaaccctgcggctggtagggggcctgtggggctgggggctgatgtggctgcggtctccagggcgggtcgggtccaggggcccccagcagtcgacaagtaacgtactaagctcaacagtaatacacggccgtgtccgcggcggtcacagagctcagcttcaggtagaactggttcttggacgtgtctacggacatggtgattcgactcttgagggacgggttgtagtaggtgctcccactatgatggatttccccaatccactccagccccttccctgggggctggcggacccagattcaccagttaccactgctgatggagtcaccagagacagcgcagatgagggacagggtctccgaaggcttcaccagtcctgggcccgactcctgcagctgcacctgggacaggaccccaagtaacgtactaagcctgagcgggctggcaaggc

SEQ ID NO: 2667 - DNA, 495 bp, Artificial Sequence
  source: /note="Description of Artificial Sequence: Synthetic polynucleotide"
gcctccctcgcgccatcagaagtaacgtggcgtattcagctcagccaaaaccctgcggctggtagggggcctgtggggctgggggctgatgtggctgcggtctccagggcgggtcgggtccaggggcccccagcagtcgacaagtaacgtggcgtattcactgcgcccgccccctccgcctccctgcggtcacagagctcagcttcagggaaaactggttcttggacgtttctattgacatggtgactcaactcctgagggacggggtgtagtagctcctcccactataatagatgtatccaatccattccagccccttccctggggactggcggaccagctccaccagttaccactgctgatggagtcaccagagacagcgcatgtgagggacagggtctccgaagcttcaccagtcctgggccccactcctgcagctgcactgggacaggacccctgtaagtaacgtggcgtatctgagcgggctggcaaggc

SEQ ID NO: 2668 - DNA, 495 bp, Artificial Sequence
  source: /note="Description of Artificial Sequence: Synthetic polynucleotide"
gcctccctcgcgccatcagaagtaacggataaccatcagctcagccaaaaccctgcggctggtagggggcctgtggggctgggggctgatgtggctgcggtctccagggcgggtcgggtccaggggcccccagcagtcgacaagtaacggataaccatcattagatggtccctctcacacaataatacatggcggcgtccgaggccttcaggctgctccactgcaggtaggcggtgctgctggagctgtcggctgagatggtgacgtggccttggaaggatgggctgtatctggtatcagagttcccaggatagatgctccccatccactccagttctttcccgggcatctggcgcacccagtggatccagtagctggtaaagctgtatccagaagtcttacaggagatcctcagagactccccgggtcttttcacctctgctgcagactgcaacagctgaagtaacggataaccactgagcgggctggcaaggc

SEQ ID NO: 2669 - DNA, 495 bp, Artificial Sequence
  source: /note="Description of Artificial Sequence: Synthetic polynucleotide"
gcctccctcgcgccatcagaagtaacgctagtgaatcagctcagccaaaaccctgcggctggtagggggcctgtggggctgggggctgatgtggctgcggtctccagggcgggtcgggtccaggggcccccagcagtcgacaagtaacgctagtgaatcagcacgtgtcctcagcctttaggctgctgatatgaagatatgccatgctgacggaggtgtccatggagaagacaaaccgtcctgtgaagccctgggcatacgttaggttcccagtgttggtgttgatccatcccatttcctcaagcccttgtccatgggcctgtcatacccagctgatagcatagcttgtgaaggtgtatccagaagccttgcaggaaaccttcaatgaggctccaggcttcttcacctcaggcccagactgcaccagctgcacctgtgagtggacacctgtggagaggagaagtaacgctagtgaactgagcgggctggcaaggc

SEQ ID NO: 2670 - DNA, 495 bp, Artificial Sequence
  source: /note="Description of Artificial Sequence: Synthetic polynucleotide"
gcctccctcgcgccatcagaagtaacgacgttcactcagctcagccaaaaccctgcggctggtagggggcctgtggggctgggggctgatgtggctgcggtctccagggcgggtcgggtccaggggcccccagcagtcgacaagtaacgacgttcactcaacagtaatactcggccgtgtcctcagcctttaggctgctgatctgaagacacgccgtgctgacagacgtgtccatggagaagacaaaccatcctgtgaagccgtgggtatacgttgggttcccagtgtaggtgatgatccatcacatccactcaaagccctgtccaggggtctatcatacccaattcataccatagatggtgaaggtgtaaccagaagacttataggagaccttcactgaggccccaggcttcttcacctcaggcccagactgcaccagctgcagggagtgggcacctgtaagtaacgacgttcacctgagcgggctggcaaggc

SEQ ID NO: 2671 - DNA, 448 bp, Artificial Sequence
  source: /note="Description of Artificial Sequence: Synthetic polynucleotide"
gcctccctcgcgccatcagaagtaacgattacgcttcagctcagccaaaaccctgcggctggtagggggcctgtggggctgggggctgatgtggctgcggtctccagggcgggtcgggtccaggggcccccagcagtcgacaagtaacgattacgcttcatctctcatacagtcatacacggccgtgtcctcagcctttaggctgctgatcttcagatacgccatgctgacagaggtgtccatggagaatagaaaccgtcctgtgaagccgttggtatatgttgggttcccagtgtaggtgatgatccatcccatccactcaagcccttgtccaggggctggtcacactgaattcataccatactggctgcatagtattccatgatttacatatatcatattttatctaatcaaagtaacgattacgctctgagcgggctggcaaggc

SEQ ID NO: 2672 - DNA, 495 bp, Artificial Sequence
  source: /note="Description of Artificial Sequence: Synthetic polynucleotide"
gcctccctcgcgccatcagaagtaacgcattgagttcagctcagccaaaaccctgcggctggtagggggcctgtggggctgggggctgatgtggctgcggtctccagggcgggtcgggtccaggggcccccagcagtcgacaagtaacgcattgagttcaacacagtaataaatggctgcatcctcagtctttaggcagctagtctgcagatccgccgtgctgacagaggtgtccatggagaagacaaaccgtgtgtgaatctgtgggcatacattgggttcaccagggtaggatgatccatcccatccactcaagcccctgtcctggggtctgtcgtatccaattcataccataggtgatgacagtttaaccagacaccttgcaggagaccttcgccgaggccccaggctgcttcacctcaggcccagactgcaccagctgcactcgggagtgggcaccaagtaacgcattgagtctgagcgggctggcaaggc

SEQ ID NO: 2673 - DNA, 495 bp, Artificial Sequence
  source: /note="Description of Artificial Sequence: Synthetic polynucleotide"
gcctccctcgcgccatcaggtctcctacttggttaccagccacacagacccccgggctgagacccaggcagggaggggtgacgttcccagggagacggtggccgggctgccctggccccagtgctccaagcacttgtcgacgtctcctacttggttatcaacagtaatacacggccgtgtcgtcagatctcagcctgctcagctccatgtaggctgtgctgatggacgtgtccctggtcatggtgaccctgccctgaaacttctgtgcatagtttgtgccaccactgttagggttgatccatcccatccactcaagcccttgtccaggggcctgtcgcacccagtgcatatagtagccggtgaaggtgtatccagaagccttgcaggagaccttcactgaggccccaggcttcttcacctcagccccagactgcaccagctgcacctgggagtgggctccgtctcctacttggttactgagcgggctggcaaggc

SEQ ID NO: 2674 - DNA, 495 bp, Artificial Sequence
  source: /note="Description of Artificial Sequence: Synthetic polynucleotide"
gcctccctcgcgccatcaggtctcctaacctcttgccagccacacagacccccgggctgagacccaggcagggaggggtgacgttcccagggagacggtggccgggctgccctggccccagtgctccaagcacttgtcgacgtctcctaacctcttgtcaacagtaatacacagccatgtcctcagatctcaggctgctcagctccatgtaggctgtgctcgcggatgtgtccctggtaatggtgactctgccctggaactcctgtgaatattttgtgttaccattgccagcgttgctccatcccatccactcaagcctttgtccgggggcctggcgcacccaatgcatagcatagctagtgaaggtgtatccagaagccttgcaggaaaccttcactgaggccccaggcttcttcacctcagccccagactgcaccagctgaacctgggagtggacaccgtctcctaacctcttgctgagcgggctggcaaggc

SEQ ID NO: 2675 - DNA, 495 bp, Artificial Sequence
  source: /note="Description of Artificial Sequence: Synthetic polynucleotide"
gcctccctcgcgccatcaggtctcctactgattctccagccacacagacccccgggctgagacccaggcagggaggggtgacgttcccagggagacggtggccgggctgccctggccccagtgctccaagcacttgtcgacgtctcctactgattcttcaacagtaatacacggccgtgtcctcagatctcaggctgctcagctccatgtaggctgtgcttatggaggtgttcctggtcatggtgactctgccctggaacttctgtgcatagcctgtgttaccactgttagggttcatccatcccatccactcaagcccttgtccagtggcctgtcgcacccagttgatatcataactggtgaaggtgtatccagaagccttgcaggagaccttcactgaggccccaggcttcttcacctcagccccagactgcaccagctgcacctgggagtgggcaccgtctcctactgattctctgagcgggctggcaaggc

SEQ ID NO: 2676 - DNA, 495 bp, Artificial Sequence
  source: /note="Description of Artificial Sequence: Synthetic polynucleotide"
gcctccctcgcgccatcaggtctcctaagtaccgaccagccacacagacccccgggctgagacccaggcagggaggggtgacgttcccagggagacggtggccgggctgccctggccccagtgctccaagcacttgtcgacgtctcctaagtaccgatcaacagtaatacacggccgtgtcgtcagatctcaggctcctcagctccatgtaggctgtgctcgtggatgtgtctgtggtcatggtgactctgccctggagcttctgtgcatagtttgtgttaccattgtaagcgctgatccatcccatccactcaagcccttgtccaggggcctgtcgcacccagctgataccatagctggtaaaggtgtaaccagaagccttgcaggagaccttcactgaggccccaggcttcttcacctcagctccagactgcaccagctgaacctgggagtgggcaccgtctcctaagtaccgactgagcgggctggcaaggc

SEQ ID NO: 2677 - DNA, 495 bp, Artificial Sequence
  source: /note="Description of Artificial Sequence: Synthetic polynucleotide"
gcctccctcgcgccatcaggtctcctaatccatggccagccacacagacccccgggctgagacccaggcagggaggggtgacgttcccagggagacggtggccgggctgccctggccccagtgctccaagcacttgtcgacgtctcctaatccatggtcaacagtaatacacggccgtgtcctcagatctcaggctgctcagctccatgtaggctgtgtctgtagatgtgtcctcggtcatggtgactctgccctggaacttctgtgcgtagattgtttcaccatcttcaggatcaaaacctcccatccactcaagcccttttccaggagcctgtcgcacccagtgcatggataattcagtgagggtgtatccggaaaccttgcaggagaccttcactgaggccccaggcttcttcacctcagccccagactgtaccagctggacctgggcgtgggtgccgtctcctaatccatggctgagcgggctggcaaggc

SEQ ID NO: 2678 - DNA, 495 bp, Artificial Sequence
  source: /note="Description of Artificial Sequence: Synthetic polynucleotide"
gcctccctcgcgccatcaggtctcctagtagcagtccagccacacagacccccgggctgagacccaggcagggaggggtgacgttcccagggagacggtggccgggctgccctggccccagtgctccaagcacttgtcgacgtctcctagtagcagttcaacagtaatacatggctgtgtcctcagatctcaggctgctcagctccatgtaggctgtgctcatagacctgtccctggtaatggtgactctgtcctggaatttctgtgcgtagttggtgttaccattgaaaggtgtgatccatcccatccactcaagcgcttgtccgggggcctgtcgcacccagtgcaggtagcggtaggtgaaggtgtatccggaagccttgcaggaaaccttcactgaggacccagtcttcttcacctcagccccagactgcaccagctgcatctgggagtaggcatcgtctcctagtagcagtctgagcgggctggcaaggc

SEQ ID NO: 2679 - DNA, 495 bp, Artificial Sequence
  source: /note="Description of Artificial Sequence: Synthetic polynucleotide"
gcctccctcgcgccatcaggtctcctaatcttcgtccagccacacagacccccgggctgagacccaggcagggaggggtgacgttcccagggagacggtggccgggctgccctggccccagtgctccaagcacttgtcgacgtctcctaatcttcgttcaacagtaatacacggccgtgtcctcagatctcaggctgctcagctccatgtagactgtgctcgtggacgtgtccctggtcatggtgactctgccctggaacttctgtgcgtagcttgtgctaccaccactagggttgattattcccatccactcaagcccttgtccaggggcctgtcgcacccagtgcatatagtagctggtgaaggtgtatccagatgccttgcaggaaaccttcactgaggccccaggcttcttcacctcagccccagactgcaccagctgcacctgggagtgagcaccgtctcctaatcttcgtctgagcgggctggcaaggc

SEQ ID NO: 2680 - DNA, 495 bp, Artificial Sequence
  source: /note="Description of Artificial Sequence: Synthetic polynucleotide"
gcctccctcgcgccatcaggtctcctatccacagtccagccacacagacccccgggctgagacccaggcagggaggggtgacgttcccagggagacggtggccgggctgccctggccccagtgctccaagcacttgtcgacgtctcctatccacagttcaacagtaatacacggccgtgtcctcggatctcaggctgctcagctccatgtaggctgtgcttgtggacatgtccctggtaatggtgactctttcctggaacttctgtgcgtagtttgtgttaccactgccaacgacgatccatcctatccactcaaggcgttgtccacgagcctgtcgcacccactgcatagcagagctagtaaaggtgaatccagaagccttgcaggagaccttcactgaggtcccaggcttcttcacctcaggcccagactgcaccagctgcatttgggagtgggcaccgtctcctatccacagtctgagcgggctggcaaggc

SEQ ID NO: 2681 - DNA, 495 bp, Artificial Sequence
  source: /note="Description of Artificial Sequence: Synthetic polynucleotide"
gcctccctcgcgccatcaggtctcctaagctagtgccagccacacagacccccgggctgagacccaggcagggaggggtgacgttcccagggagacggtggccgggctgccctggccccagtgctccaagcacttgtcgacgtctcctaagctagtgtcaacagtaatacacggccgtgtcctcagatctcaggctgctcagctccatgtaggctgtgctcgtggatttgtccgcggtaatcgtgactctgccctggaacttctgtgcgtagtttgctgtaccaaagatagggatgatccctcccatccactcaagcccttgtccaggggcctgtcgcacccagctgatagcatagctgctgaaggtgcctccagaagccttgcaggagaccttcaccgaggacccaggcttcttcacctcagccccagactgcaccagctgcacctgggactggacaccgtctcctaagctagtgctgagcgggctggcaaggc

SEQ ID NO: 2682 - DNA, 495 bp, Artificial Sequence
  source: /note="Description of Artificial Sequence: Synthetic polynucleotide"
gcctccctcgcgccatcaggtctcctataaccaagccagccacacagacccccgggctgagacccaggcagggaggggtgacgttcccagggagacggtggccgggctgccctggccccagtgctccaagcacttgtcgacgtctcctataaccaagtcaatagtaatacacagccatgtcctcagatgtcaggctgctcaggtctgtgtaggctgtggttgtggacatgtccctggtcatggtgaatctgccctgaaacttcttggcatagcttgggctaccattgccagggttgatccatcccatccactcaagcccttgtccaggggactgttgcacccaatgtataccgtagctggtgatggtaaacccagaaaaactacaggagactttcactgaggccccagacttcctcacctcagcccaagactgcaccagctggacctgggagtgggcaccgtctcctataaccaagctgagcgggctggcaaggc

SEQ ID NO: 2683 - DNA, 495 bp, Artificial Sequence
  source: /note="Description of Artificial Sequence: Synthetic polynucleotide"
gcctccctcgcgccatcaggtctcctacaagaggtccagccacacagacccccgggctgagacccaggcagggaggggtgacgttcccagggagacggtggccgggctgccctggccccagtgctccaagcacttgtcgacgtctcctacaagaggttcaacagtaatacacggccgtgtcctcagatctcaggctgctcagctccatgtaggctgtgtctgtagacgtgtccgcggttatggtgactctgccctggaacttctctgcgtatattgtttcaccatcttcaggatcaacaagtcccatccactcaagcccttttccaggggcctgttgcacccagtgcatgtagtagtcggtgaaggtgtatccagaaaccttgcaggagattttcactgtagccccaggcttcttcacctcagccccagactgtaccagctggacctcggcgtgggtgccgtctcctacaagaggtctgagcgggctggcaaggc

SEQ ID NO: 2684 - DNA, 495 bp, Artificial Sequence
  source: /note="Description of Artificial Sequence: Synthetic polynucleotide"
gcctccctcgcgccatcaggtctcctaagttgaccccagccacacagacccccgggctgagacccaggcagggaggggtgacgttcccagggagacggtggccgggctgccctggccccagtgctccaagcacttgtcgacgtctcctaagttgacctcatgcacagtaatatgtggctgtgtccacagggtccatgttggtcattgtaaggaccacctggtttttggaggtgtccttggtgatggtgagcctgctcttcagagatgggctgtagcgcttatcatcattccaataaatgagtgcaagccactccagggcctttcctgggggctgacggatccagcccacacccactccactagtgctgagtgagaacccagagaaggtgcaggtcagcgtgagggtctgtgtgggtttcaccagcgtaggaccagactccttcaaggtgatctgggacaagtctcctaagttgaccctgagcgggctggcaaggc

SEQ ID NO: 2685 - DNA, 495 bp, Artificial Sequence
  source: /note="Description of Artificial Sequence: Synthetic polynucleotide"
gcctccctcgcgccatcaggtctcctacagcatatccagccacacagacccccgggctgagacccaggcagggaggggtgacgttcccagggagacggtggccgggctgccctggccccagtgctccaagcacttgtcgacgtctcctacagcatattcatgcacagtaatatgtggctgtgtccacagggtccatgttggtcatggtaaggaccacctggcttttggaggtgtccttggagatggtgagcctgctcttcagagatgtgctgtaggatttttcgtcattcgaaaaaatgtgtgcaagccactccagggccttccctgggggctgacggatccagctcacacccattctagcattgctgagtgagaacccagagacggtgcaggtcagcgtgagggtctctgtgggtttcaccagcacaggaccagactccttcaaggtgacctgggacaagtctcctacagcatatctgagcgggctggcaaggc

SEQ ID NO: 2686 - DNA, 495 bp, Artificial Sequence
  source: /note="Description of Artificial Sequence: Synthetic polynucleotide"
gcctccctcgcgccatcaggtctcctagcaggattccagccacacagacccccgggctgagacccaggcagggaggggtgacgttcccagggagacggtggccgggctgccctggccccagtgctccaagcacttgtcgacgtctcctagcaggatttcatgcacaataatacgtggctgtgtccacagggtccatgttggtcattgtaaggaccacctggtttttggaggtgtccttggagatggtgagcctggtcttcagagatgtgctgtagtatttatcatcatcccaatcaatgagtgcaagccactccagggccttccctgggggctgacggatccagctcacacacattccactagtgctgagtgagaacccagagaaggtgcaggtcagtgtgagggtctgtgtgggtttcaccagcgcaggaccagactccctcaaggtgacctgggataagtctcctagcaggattctgagcgggctggcaaggc

SEQ ID NO: 2687 - DNA, 495 bp, Artificial Sequence
  source: /note="Description of Artificial Sequence: Synthetic polynucleotide"
gcctccctcgcgccatcaggtctcctagtccattcccagccacacagacccccgggctgagacccaggcagggaggggtgacgttcccagggagacggtggccgggctgccctggccccagtgctccaagcacttgtcgacgtctcctagtccattctcaacagtaatacacagccgtgtcctcggctctcaggctgttcatttgcagatacagtgagttcttggcgttgtctctggagatggtgaatcggcccttcacagagtccacatagtatttctcacttccatcttgctttatgttggccacccactccagccccttccctggagcctggcggacccagctcatccaatagctactaaaggtgaatccagaggctgcacaggagagtctcagggaccccccaggctggaccaagcctcccccagactccaccagctgcacctcacactggacaccgtctcctagtccattcctgagcgggctggcaaggc

SEQ ID NO: 2688 - DNA, 495 bp, Artificial Sequence
  source: /note="Description of Artificial Sequence: Synthetic polynucleotide"
gcctccctcgcgccatcaggtctcctagcataactccagccacacagacccccgggctgagacccaggcagggaggggtgacgttcccagggagacggtggccgggctgccctggccccagtgctccaagcacttgtcgacgtctcctagcataacttcatgcacagtaatacaaggccgtgtcctcagctctcagactgttcatttgcagatacagggagttcttggcgttgtctctggagatggtgaatcggcccttcacagagtccgcatagcctatgctaccactattccaactaatacctgagacccactccaggcccttccctggagcttgccggacccagtgcatggcataatcatcaaaggtgaatccagaggctgcacaggagagtctcagggacctgccaggctgtaccaagcctcccccagactccaccagctgcacttcacactggacgtctcctagcataactctgagcgggctggcaaggc

SEQ ID NO: 2689 - DNA, 495 bp, Artificial Sequence
  source: /note="Description of Artificial Sequence: Synthetic polynucleotide"
gcctccctcgcgccatcaggtctcctaatatgctgccagccacacagacccccgggctgagacccaggcagggaggggtgacgttcccagggagacggtggccgggctgccctggccccagtgctccaagcacttgtcgacgtctcctaatatgctgtcaacagtaatacacggccgtgtcctcggctctcaggctgttcatttgcagatacagtgagttcttggcgttgtccctggagatggtgaatcggcccttcacagagtctgcgtagtatatggtactaccactactactaatgtatgaaacccactccagccccttccctggagcctggcggatccagctcatgtagtagtcactgaaggtgaatccagaggctgcacaggagagtctcagggaccctccaggcttgaccaagcctcccccagactccaccagctgcacctgacactggacaccgtctcctaatatgctgctgagcgggctggcaaggc

SEQ ID NO: 2690 - DNA, 495 bp, Artificial Sequence
  source: /note="Description of Artificial Sequence: Synthetic polynucleotide"
gcctccctcgcgccatcaggtctcctaaatcctgcccagccacacagacccccgggctgagacccaggcagggaggggtgacgttcccagggagacggtggccgggctgccctggccccagtgctccaagcacttgtcgacgtctcctaaatcctgctcaacagtaatacacagccgtgtccccggctctcaggctgttcatttgaagatacaaggagttcttggcattttctctggagatggtgaatcggcccttcacggagcctggatagtatgtgtcaccagcagtaccaatagctgagacccactccagaccttttcctgtagcttggcggacccagtgcatgtcgtagctactgaaggtgaatccagaggctgcacaggagagtctcagggaccccccaggctgtaccaagcctcccccagactccaccagctgcacctcacactggacacctgcgtctcctaaatcctgcctgagcgggctggcaaggc

SEQ ID NO: 2691 - DNA, 495 bp, Artificial Sequence
  source: /note="Description of Artificial Sequence: Synthetic polynucleotide"
gcctccctcgcgccatcaggtctcctatgagacctccagccacacagacccccgggctgagacccaggcagggaggggtgacgttcccagggagacggtggccgggctgccctggccccagtgctccaagcacttgtcgacgtctcctatgagaccttcaacagtaatacacggctgtgtcctcggttttcaggctgttcatttgcagatacagcgtgttttttgaatcatctcttgagatggtgaatctgcctttcacgggtgcagcgtagtctgttgtcccaccatcagttttgcttttaatacggccaacccactccagccccttccctggagcctggcggacccagctcatccaggcgttactgaaagtgaatccagaggctgcacaggagagtctaagggaccccccaggctttaccaagcctcccccagactccaccagctgcacctcacactggtctcctatgagacctctgagcgggctggcaaggc

SEQ ID NO: 2692 - DNA, 495 bp, Artificial Sequence
  source: /note="Description of Artificial Sequence: Synthetic polynucleotide"
gcctccctcgcgccatcaggtctcctagaatggacccagccacacagacccccgggctgagacccaggcagggaggggtgacgttcccagggagacggtggccgggctgccctggccccagtgctccaagcacttgtcgacgtctcctagaatggactcaacagtaatacacagccatgtcctcggctctccgtctgttcttttgcagatacagggagttcctggaattgtctctggagatgatgaatcggcgcttcacggagtccacatagtgcgtcctactgccattccaactaacacccgatacccactccagcccctttcctggagccttgcgggcccagttcatgtcactgttactgaaggtgaatccagaggctgcacaggagagtctcagggaccccccaggctgtaccaagcctcccccagactccaccagctgcacctcacactggacaccgtctcctagaatggacctgagcgggctggcaaggc

SEQ ID NO: 2693 - DNA, 495 bp, Artificial Sequence
  source: /note="Description of Artificial Sequence: Synthetic polynucleotide"
gcctccctcgcgccatcaggtctcctacacatggaccagccacacagacccccgggctgagacccaggcagggaggggtgacgttcccagggagacggtggccgggctgccctggccccagtgctccaagcacttgtcgacgtctcctacacatggatcaacagtgatacaaggccgtgtcctcggctctcagactgttcatttgcagatacagggagttcttggcgttgtctctggagatggtgaatcggcccttcacagagtctgcataacctgtgctaccaccattccaattaataccagagacccactccagccccttccctggagcttggcggacccagctcatgccataatcatcaaaggtgaatccagaggctgcacaggagagtctcagggaccccccaggccgtaccacacctcccccagactccaccagctgcacctcacactggacaccgtctcctacacatggactgagcgggctggcaaggc

SEQ ID NO: 2694 - DNA, 495 bp, Artificial Sequence
  source: /note="Description of Artificial Sequence: Synthetic polynucleotide"
gcctccctcgcgccatcaggtctcctattgaccatccagccacacagacccccgggctgagacccaggcagggaggggtgacgttcccagggagacggtggccgggctgccctggccccagtgctccaagcacttgtcgacgtctcctattgaccattcaacagtaatacacagccgtgtcctcggctctcaggctgttcatttgcagatacagtgagttcttggcgttgtctctggagatggtgaatcggcccttcactgagtctgcgtagtatatgtaactactactactactaatggatgagacccactccagccccttccctggagcctggcggacccagttcatgctatagctactgaaggtgaatccagaggctgcacaggagagtctcagggaccccccaggcttgaccaggcctcccccagactccaccagctgcacctcacactggacaccgtctcctattgaccatctgagcgggctggcaaggc

SEQ ID NO: 2695 - DNA, 495 bp, Artificial Sequence
  source: /note="Description of Artificial Sequence: Synthetic polynucleotide"
gcctccctcgcgccatcaggtctcctaaagccatcccagccacacagacccccgggctgagacccaggcagggaggggtgacgttcccagggagacggtggccgggctgccctggccccagtgctccaagcacttgtcgacgtctcctaaagccatctcaacagtaatatacggccgtgtcctcggctctcaggctgttcatttgcagatacagcgtgttcttggaattgtctctggagatggtgaaccggcccttcacggagtctgcgtagtatgtgctaccaccactaccactaatagctgagacccactccagccccttccctggagcctggcggacccagctcatggcatagctgctaaaggtgaatccagaggctgcacaggagagtctcagggaccccccaggctgtaccaagcctcccccagactccaacagctgcacctcacactggacaccgtctcctaaagccatcctgagcgggctggcaaggc

SEQ ID NO: 2696 - DNA, 495 bp, Artificial Sequence
  source: /note="Description of Artificial Sequence: Synthetic polynucleotide"
gcctccctcgcgccatcaggtctcctatccatgtgccagccacacagacccccgggctgagacccaggcagggaggggtgacgttcccagggagacggtggccgggctgccctggccccagtgctccaagcacttgtcgacgtctcctatccatgtgtcaacagtaatacacagccgtgtcctcagctctcaggctgttcatttgcagatacagcgtgttcttggaattgtctctggagatggtgaatcggcccttcacggagtctgcatagtatttattacttccatcatatgatataactgccacccactccagccccttgcctggagcctggcggacccagtgcatgccatagctactgaaggtgaatccagaggctgcacaggagagtctcagggacctcccaggctggaccacgcctcccccagactccaccagctgcacctgacactggacaccgtctcctatccatgtgctgagcgggctggcaaggc

SEQ ID NO: 2697 - DNA, 495 bp, Artificial Sequence
  source: /note="Description of Artificial Sequence: Synthetic polynucleotide"
gcctccctcgcgccatcaggtctcctacaagtcacccagccacacagacccccgggctgagacccaggcagggaggggtgacgttcccagggagacggtggccgggctgccctggccccagtgctccaagcacttgtcgacgtctcctacaagtcactcaacagtaatacacagccgtgtcctcagctctcaggctgttcatttgcagatacagcgtgttcttggaattgtctctggagatggtgaatcggcccttcacggagtctgcatagtatttattacttccatcatatgatataactgccacccactccagccccttgcctggagcctggcggacccagtgcatgccatagctactgaaggtgaatccagaggctgcacaggagagtctcagggacctcccaggctggaccacgcctcccccagactccaccagctgcacctgacactggacaccgtctcctacaagtcacctgagcgggctggcaaggc

SEQ ID NO: 2698 - DNA, 495 bp, Artificial Sequence
  source: /note="Description of Artificial Sequence: Synthetic polynucleotide"
gcctccctcgcgccatcaggtctcctactgcaatcccagccacacagacccccgggctgagacccaggcagggaggggtgacgttcccagggagacggtggccgggctgccctggccccagtgctccaagcacttgtcgacgtctcctactgcaatctcaacagtaatacacagccgtgtcctcggctctcaggctgttcatttgcagatacagcgtgttcttggaattgtctctggagatggtgaatcggcccttcacggagtctgcatagtatttattacttccatcataccatataactgccacccactccagccccttgcctggagcctggcggacccagtgcatgccatagctactgaaggtgaatccagacgctgcacaggagagtctcagggacctcccaggctggaccacgcctcccccagactccaccagctgcacctgacactggacaccgtctcctactgcaatcctgagcgggctggcaaggc

SEQ ID NO: 2699 - DNA, 495 bp, Artificial Sequence
  source: /note="Description of Artificial Sequence: Synthetic polynucleotide"
gcctccctcgcgccatcaggtctcctaatcgacgaccagccacacagacccccgggctgagacccaggcagggaggggtgacgttcccagggagacggtggccgggctgccctggccccagtgctccaagcacttgtcgacgtctcctaatcgacgatcaacagtaatacacagccgtgtcctcggccctcaggctattcgtttgcagatacagggtgttcctggaattgtctctggagatgatgaatcggcccttcacagagtctgcatagtgcgtcctactgccattccaactaacacccgatacccactccagcccctttcctggagcctgatggacccagttcatgtcactgttactgaaggtgaatccagaggctgcacaggagagtctcagggatcccccaggctgtaccaagcctcccccagactccaccagctgcacctcacactggacaccgtctcctaatcgacgactgagcgggctggcaaggc

SEQ ID NO: 2700 - DNA, 495 bp, Artificial Sequence
  source: /note="Description of Artificial Sequence: Synthetic polynucleotide"
gcctccctcgcgccatcaggtctcctaacagactgccagccacacagacccccgggctgagacccaggcagggaggggtgacgttcccagggagacggtggccgggctgccctggccccagtgctccaagcacttgtcgacgtctcctaacagactgtcaacagtaatacacggccgtgccctcagctctcaggttgttcatttgaagatacagcgtgttcttggaattgtctctggagatggtgaatctgcccttcctggagtctgcgtagtatgtgctaccaccactaatggatgagacccactccagccccttccctggagcctggcggatccagctcatctcattgctactgacggtgaatccagaggctgcacaggagagtctcagggaccccctaggctgtaccaagcctcccccagactccaccagctgcacctcacactggacacctgcaaagtctcctaacagactgctgagcgggctggcaaggc

SEQ ID NO: 2701 - DNA, 495 bp, Artificial Sequence
  source: /note="Description of Artificial Sequence: Synthetic polynucleotide"
gcctccctcgcgccatcaggtctcctaccttatagccagccacacagacccccgggctgagacccaggcagggaggggtgacgttcccagggagacggtggccgggctgccctggccccagtgctccaagcacttgtcgacgtctcctaccttatagtcatgcacagtaatacaaggcggtgtcctcagttctcagactgttcatttgcagatacagggagtttttgctgttgtctctggagatggtgaatcggcccttcacagagtctgcatagtatgtgctaccaccatcccaactaataagagagacccactccagacccttccccggagcttgacggacccagtgcatggtataatcatcaaaggtgaatccagaggctgcacaggagagtctcagggaccccccaggctgtaccacgactcccccagactccaccagctgcacttcacactggacgtctcctaccttatagctgagcgggctggcaaggc

SEQ ID NO: 2702 - DNA, 495 bp, Artificial Sequence
  source: /note="Description of Artificial Sequence: Synthetic polynucleotide"
gcctccctcgcgccatcaggtctcctatacgcgttccagccacacagacccccgggctgagacccaggcagggaggggtgacgttcccagggagacggtggccgggctgccctggccccagtgctccaagcacttgtcgacgtctcctatacgcgtttcaacagtaatacacagccgtgtcctcgtctctcaggctgttcatttgcagatacagtgagttcttggcattgtctctggagatggtgaatcggcccttcacagagtctgcgtagtatatggtactactactactactaatgtatgaaacccactccagccccttccctggagcctggcggacccagttcatgctatagctactgaaggtgaatccagaggctgcacaggagagtctcagggaccccccaggctgtaccaagcctcccccagactccaccagctgcacctcacactggacaccgtctcctatacgcgttctgagcgggctggcaaggc

SEQ ID NO: 2703 - DNA, 495 bp, Artificial Sequence
  source: /note="Description of Artificial Sequence: Synthetic polynucleotide"
gcctccctcgcgccatcaggtctcctactataaggccagccacacagacccccgggctgagacccaggcagggaggggtgacgttcccagggagacggtggccgggctgccctggccccagtgctccaagcacttgtcgacgtctcctactataaggtcaacagtaatacacggctgtgtcctcggttttcaggctgttcatttgcagataggcgatgcttttggaatcatctcttgagatggtgaatctgcctttcacagacgcggcgtattctgttgtcccaccataagctttgcttctaatgaaacctacccactccagccccttccctggagcctggcggaaccagctcatagcataatcaccaaaggtgaatccagaagctgtacaggagagtctcagggaccgccctggctgtaccaagcctcccccagactccaccagctgcacctcacattggtctcctactataaggctgagcgggctggcaaggc

SEQ ID NO: 2704 - DNA, 495 bp, Artificial Sequence
  source: /note="Description of Artificial Sequence: Synthetic polynucleotide"
gcctccctcgcgccatcaggtctcctatcttagtcccagccacacagacccccgggctgagacccaggcagggaggggtgacgttcccagggagacggtggccgggctgccctggccccagtgctccaagcacttgtcgacgtctcctatcttagtctcaacagtaatacacggccgtgtcctcggctctcaggctgttcatttgaagatacagcgtgttcttggaattgtctctggagatggtgaatcggcccttcacggagtctgcgtagtatgtgctaccaccgctataaataactgagacccactccagccccttccctggagcctggcggacccagctcatgtagttgctactgacggtgaacccagaggctgcacaggagagtctcagggaccccccaggctggatcaagcctcctccagactccaccagctgcacctcacactggacacctgcgtctcctatcttagtcctgagcgggctggcaaggc

SEQ ID NO: 2705 - DNA, 495 bp, Artificial Sequence
  source: /note="Description of Artificial Sequence: Synthetic polynucleotide"
gcctccctcgcgccatcaggtctcctatgtctgcaccagccacacagacccccgggctgagacccaggcagggaggggtgacgttcccagggagacggtggccgggctgccctggccccagtgctccaagcacttgtcgacgtctcctatgtctgcatcaacagtaatacacagccatgtcctcagctctcaggctgcccatttgaagatacagcgtgttcttggaattgtctctggagatggtgaatctgcccttcacagagtctgcataatatgtgctacccccattactactaatagctgaaacatattccagtcccttccctggagcctggcggacccagtgcatagcatagctactgaaggtgaatccagaggctgcacaggagagtctcagggaccccccaggctggaccaagccttccccagactccaccagctgcacctcacactggacaccgtctcctatgtctgcactgagcgggctggcaaggc

SEQ ID NO: 2706 - DNA, 495 bp, Artificial Sequence
  source: /note="Description of Artificial Sequence: Synthetic polynucleotide"
gcctccctcgcgccatcaggtctcctagccattaaccagccacacagacccccgggctgagacccaggcagggaggggtgacgttcccagggagacggtggccgggctgccctggccccagtgctccaagcacttgtcgacgtctcctagccattaatcaacagtaatacacagccgtgtcctcagctctcaggctgttcatttgaagatacagcgtgttcttggaattgtctctggagatggtgaatcggcccttcacggagtctgcgtagtatgtgctaccacagctataaataactgagacccactccagccccttccctggagcctggcggacccagctcatgtagttgctactgacggtgaacccagaggctgcacaggagagtctcagggaccccccaggctggatcaagcctcctccagactccaccagctgcacctcacactggacacctgcgtctcctagccattaactgagcgggctggcaaggc

SEQ ID NO: 2707 - DNA, 495 bp, Artificial Sequence
  source: /note="Description of Artificial Sequence: Synthetic polynucleotide"
gcctccctcgcgccatcaggtctcctagactaagaccagccacacagacccccgggctgagacccaggcagggaggggtgacgttcccagggagacggtggccgggctgccctggccccagtgctccaagcacttgtcgacgtctcctagactaagatcaacagtaatacacggccgtgtcctcggttttcaggctgttcatttgcagatacagtgagttctttgaatcatctcttgagatggtgaatctgcctttcacagacgcggcgtattctgtggtgtaactgttagctttgtttctagtacggccaacccactccagccccttccctggagcctggcggacccagtccatgtagtggtcactgaaggtgaatccagaggctgcacaggagagtctcagggaccctccaggctggaccaagcctcccccagactccaccagctgcacctcacactggtctcctagactaagactgagcgggctggcaaggc

SEQ ID NO: 2708 - DNA, 495 bp, Artificial Sequence
  source: /note="Description of Artificial Sequence: Synthetic polynucleotide"
gcctccctcgcgccatcaggtctcctaaggttgctccagccacacagacccccgggctgagacccaggcagggaggggtgacgttcccagggagacggtggccgggctgccctggccccagtgctccaagcacttgtcgacgtctcctaaggttgcttcaacagtaatacacggccgtgtcctcggttttcaggctgttcatttgcagatacgccgtgttctttgaatcatctctggagatggtgaacctgcctttcaccgacgcagcatatgctgtcgcgtaactgttagctttgcttctaatacggccaacccactccagccctttcccggaagcctggcggacccagtgcatagcagagccactgaaggtgaacccagaggctgcacaggagagtttcagggaccccccaggctggaccaagcctcccccggactccaccagctgcacctcacactggtctcctaaggttgctctgagcgggctggcaaggc

SEQ ID NO: 2709 - DNA, 495 bp, Artificial Sequence
  source: /note="Description of Artificial Sequence: Synthetic polynucleotide"
gcctccctcgcgccatcaggtctcctactcgagaaccagccacacagacccccgggctgagacccaggcagggaggggtgacgttcccagggagacggtggccgggctgccctggccccagtgctccaagcacttgtcgacgtctcctactcgagaatcaacagtaatacacagccgtgtcctcggctctcagactgttcatttgcagatacagcgtgttcttggcgttgtctctggagatggtgaatcggcccttcacggagtccgcgtagcttgtgctactcccatcactattaatacgtgagacccacaccagccccttccctggagcttggcggacccagtgcatccagtagctactgaaggtgaatccagaggctgcacaggagagtctcagggaccccccaggctgaactaagcctcccccggactccaccagctgcacctcacactggacaccgtctcctactcgagaactgagcgggctggcaaggc

SEQ ID NO: 2710 - DNA, 495 bp, Artificial Sequence
  source: /note="Description of Artificial Sequence: Synthetic polynucleotide"
gcctccctcgcgccatcaggtctcctattaatggcccagccacacagacccccgggctgagacccaggcagggaggggtgacgttcccagggagacggtggccgggctgccctggccccagtgctccaagcacttgtcgacgtctcctattaatggctcaacagtaatacacagccgtgtcctcagctctcaggctgttcatttgcagatacagcgtgttcttggaattgtctctggagatggtgaatcggcccttcacggagtctgcatagtatttattacttccatcataccgtataaatgccacccactccagccccttgcctggagcctggcggacccagtgcatgccatagctactgaaggtgaatccagacgctgcacaggagagtctcagggaccccccaggctggaccacgcctcccccagactccaccagctgcacctgacactggacaccgtctcctattaatggcctgagcgggctggcaaggc

SEQ ID NO: 2711 - DNA, 495 bp, Artificial Sequence
  source: /note="Description of Artificial Sequence: Synthetic polynucleotide"
gcctccctcgcgccatcaggtctcctatgcagacaccagccacacagacccccgggctgagacccaggcagggaggggtgacgttcccagggagacggtggccgggctgccctggccccagtgctccaagcacttgtcgacgtctcctatgcagacatcaacagtaatacacagccgtgtcctcagctctcaggctgttcatttgaagatgcagcgtgttcttggaattgtctctggagatggtgaatctgcccttcctggagtctgcgtagtatgtgctaccaccactaatggatgagacccactccagacccttccctggagcctggcggacccagctcatctcattgctactgacggtgaatccagaggctgcacaggagagtctcagggaccccccaggctgtaccaagactccccgagactccaccagctgcacctcacactggacacctgcaaagtctcctatgcagacactgagcgggctggcaaggc

SEQ ID NO: 2712 - DNA, 495 bp, Artificial Sequence
  source: /note="Description of Artificial Sequence: Synthetic polynucleotide"
gcctccctcgcgccatcaggtctcctatcactgagccagccacacagacccccgggctgagacccaggcagggaggggtgacgttcccagggagacggtggccgggctgccctggccccagtgctccaagcacttgtcgacgtctcctatcactgagtcaacagtaatacacggccgtgtccgcggcggtcacagagctcagcttcagggagaactggttcttggacgtgtctactgacatggtgactcgactcttgagggaggggttgtagttggtgctcccactggtatagatacgcccaatccactccagtcccttcccggcgggctgccggatccagctccagtagtaactactgatggagccaccagagacagtgcaggtgagggacagggtctccgaaggcttcaccagtcctgggcccgactcctgcagctgcacctgggacaggacccctgtgtctcctatcactgagctgagcgggctggcaaggc

SEQ ID NO: 2713 - DNA, 495 bp, Artificial Sequence
  source: /note="Description of Artificial Sequence: Synthetic polynucleotide"
gcctccctcgcgccatcaggtctcctagagtacgtccagccacacagacccccgggctgagacccaggcagggaggggtgacgttcccagggagacggtggccgggctgccctggccccagtgctccaagcacttgtcgacgtctcctagagtacgttcaacagtaatacacggccgtgtccacggcggtcacagagctcagcttcagggagaactggttcttggacgtgtctactgacatggtgactcgactcttgagggacgggttgtagtaggtgctcccactataatagatgtacccaatccactccagtcccttccctgggggctgccggatccagccccaccagttactactgctgatggagtaaccagagacagcgcaggtgagggacagggtgtccgaaggcttcaccagtcctgggcccgactcctgcagctgcacctgggacaggaccacgtctcctagagtacgtctgagcgggctggcaaggc

SEQ ID NO: 2714 - DNA, 495 bp, Artificial Sequence
  source: /note="Description of Artificial Sequence: Synthetic polynucleotide"
gcctccctcgcgccatcaggtctcctaatacgccaccagccacacagacccccgggctgagacccaggcagggaggggtgacgttcccagggagacggtggccgggctgccctggccccagtgctccaagcacttgtcgacgtctcctaatacgccatcaacagtaatacacggccgtgtccgcggcggtcacagagctcagcttcagggagaactggttcttggacctgtctactgatatggtgactcgactcttgagggacgggttgtagtaggtgctcccactatgatagatgtacccaatccactccaggcccttccctggtggctgccggatccagctccaggagtaaccaccactgctgatggagccaccagagacagcgcaggtgagggacagggtctgtgaaggcttcaccagtcctgagccggactcctgcagctgcagctgggacaggacgtctcctaatacgccactgagcgggctggcaaggc

SEQ ID NO: 2715 - DNA, 495 bp, Artificial Sequence
  source: /note="Description of Artificial Sequence: Synthetic polynucleotide"
gcctccctcgcgccatcaggtctcctatcgcatcaccagccacacagacccccgggctgagacccaggcagggaggggtgacgttcccagggagacggtggccgggctgccctggccccagtgctccaagcacttgtcgacgtctcctatcgcatcatcaacagtaatacacggccgtgtctgcggcagtcacagagctcagcttcagggagaactggttcttggacgtgtctactgatatggtaactcgactcttgagggacgggttgtagtaggtgctcccactgtaatagatgtacccaatccactccaggcccttccctgggggctggcggatccaactccagtagtaatcaccactgctgatggagccaccagagacagtgcaggtgagggacagggtctgtgaaggcttcaccagtcctgggcccgactcctgcagctgcacctgggacaggacgtctcctatcgcatcactgagcgggctggcaaggc

SEQ ID NO: 2716 - DNA, 495 bp, Artificial Sequence
  source: /note="Description of Artificial Sequence: Synthetic polynucleotide"
gcctccctcgcgccatcaggtctcctacgcttaatccagccacacagacccccgggctgagacccaggcagggaggggtgacgttcccagggagacggtggccgggctgccctggccccagtgctccaagcacttgtcgacgtctcctacgcttaattcaacagtaatacacggccgtgtccgcggcagtcacagagctcagcttcagggagaactggttcttagacgtgtctactgatatggtaactcgactcttgagggacgggttgtagtaggtgctcccactgtaatagatgtacccaatccactccaggcccttccctgggtgctggcggatccagctccagtagtaaccaccactgctgatggagccaccagagacagtacaggtgagggacagggtctgtgaaggcttcaccagtcctgggcccgactcctgcagctgcacctggggcaggacgtctcctacgcttaatctgagcgggctggcaaggc

SEQ ID NO: 2717 - DNA, 495 bp, Artificial Sequence
  source: /note="Description of Artificial Sequence: Synthetic polynucleotide"
gcctccctcgcgccatcaggtctcctatggttatcccagccacacagacccccgggctgagacccaggcagggaggggtgacgttcccagggagacggtggccgggctgccctggccccagtgctccaagcacttgtcgacgtctcctatggttatctcaacagtaatacacagccgtgtccgcggcggtcacagagctcagcttcagggagaactggttcttggacgtgtctactgatatggtgactcgactcttgagggacgggttgtagttggtgcttccactatgattgatttccccaatccactccagccccttccctgggggctggcggatccagctccagtagtaaccactgaaggacccaccatagacagcgcaggtgagggacagggtctccgaaggcttcaacagtcctgcgccccactgctgtagctgcacctgggacaggacccctgtgtctcctatggttatcctgagcgggctggcaaggc

SEQ ID NO: 2718 - DNA, 495 bp, Artificial Sequence
  source: /note="Description of Artificial Sequence: Synthetic polynucleotide"
gcctccctcgcgccatcaggtctcctaggattgctccagccacacagacccccgggctgagacccaggcagggaggggtgacgttcccagggagacggtggccgggctgccctggccccagtgctccaagcacttgtcgacgtctcctaggattgcttcaacagtaatacacagccgtgtctgcggcggtcacagagctcagcttcagggagaactggttcttggacgtgtctacggatatggtgactcgactcttgagggacgggttgtagtaggtgctcccactataatagatactcccaatccactccagccccttccctgggggctggcggatccagccccagtagtaactactactgctgatggagccaccagagacagtgcaggtgagggacagggtctccgaaggcttcaccagtcctgggcccgactcctgcagctgcagctgggacaggacgtctcctaggattgctctgagcgggctggcaaggc

SEQ ID NO: 2719 - DNA, 495 bp, Artificial Sequence
  source: /note="Description of Artificial Sequence: Synthetic polynucleotide"
gcctccctcgcgccatcaggtctcctactcagtgaccagccacacagacccccgggctgagacccaggcagggaggggtgacgttcccagggagacggtggccgggctgccctggccccagtgctccaagcacttgtcgacgtctcctactcagtgatcaacagtaatacacggccgtgtccgcagcggtcacagagctcagcttcagggagaactggttcttggacgtgtctactgatatggtgactcgactcttgagggaggggttgtagttggtgctcccactgtaatagatatacccaatccactccagtcccttccctgggggctgccggatccagctccagtagtaactactgatggagccaccagagacagtgcaggtgagggacagggtctccgaaggcttcaccagtcctgggcccgactcctgcagctgcacctgggacaggacccctgtgtctcctactcagtgactgagcgggctggcaaggc

SEQ ID NO: 2720 - DNA, 495 bp, Artificial Sequence
  source: /note="Description of Artificial Sequence: Synthetic polynucleotide"
gcctccctcgcgccatcaggtctcctaacgtactcccagccacacagacccccgggctgagacccaggcagggaggggtgacgttcccagggagacggtggccgggctgccctggccccagtgctccaagcacttgtcgacgtctcctaacgtactctcaacagtaatacacggccgtgtccgcagcggtcacagagctcagcttcagggagaactggttcttggacgtgtctactgatatggtgactcgactcttgagggaggggttgtagttggtgctcccactgtaatagatatacccaatccactccagtcccttccctgggggctgccggatccagctccagtagtaaccaccactgctgacggagccaccagagacagtgcaggtgagggacagggtctccgaaggcttcaccagtcctgggcccgactcctgcagctgcacctgggacaggacgtctcctaacgtactcctgagcgggctggcaaggc

SEQ ID NO: 2721 - DNA, 495 bp, Artificial Sequence
  source: /note="Description of Artificial Sequence: Synthetic polynucleotide"
gcctccctcgcgccatcaggtctcctatgatgcgaccagccacacagacccccgggctgagacccaggcagggaggggtgacgttcccagggagacggtggccgggctgccctggccccagtgctccaagcacttgtcgacgtctcctatgatgcgatcaacagtaatacacggccgtgtctgcggcggtcacagagctcagcttcagggagaactggttcttggacgtgtctactgatatggtgactcgactcttgagggacgggttgtagtaggtgctcccactatgatagatactcccaatccactccagccccttccctgggggctgccggatccagccccagtagtaaccactgctgatggagtaaccagagacagcgcaggtgagggacagggtctccgaaggcttcaccagtcctgggcccgactcctgcagctgcacctgggacaggaccccgtctcctatgatgcgactgagcgggctggcaaggc

SEQ ID NO: 2722 - DNA, 495 bp, Artificial Sequence
  source: /note="Description of Artificial Sequence: Synthetic polynucleotide"
gcctccctcgcgccatcaggtctcctaattaagcgccagccacacagacccccgggctgagacccaggcagggaggggtgacgttcccagggagacggtggccgggctgccctggccccagtgctccaagcacttgtcgacgtctcctaattaagcgtcaacagtaatacatggcggtgtccgaggccttcaggctgctccactgcaggtaggcggtgctgatggacttgtcggctgagatggtgacctggccttggaaggacgggctgtatctggtatcagagtcaccaggatagatgatccccatccactccaggcctttcccgggcatctggcgcacccagccgatccagtagctggtaaagctgtatccagaacccttacaggagatcttcagagactccccgggctttttcacctctgctccagactgcaccagctgcacctcggcacagactccgtctcctaattaagcgctgagcgggctggcaaggc

SEQ ID NO: 2723 - DNA, 495 bp, Artificial Sequence
  source: /note="Description of Artificial Sequence: Synthetic polynucleotide"
gcctccctcgcgccatcaggtctcctaagcaatccccagccacacagacccccgggctgagacccaggcagggaggggtgacgttcccagggagacggtggccgggctgccctggccccagtgctccaagcacttgtcgacgtctcctaagcaatcctcaacagtaatacatggcggtgtccgaggccttcaggctgctccactgcaggtaggcagtgctgatggacttgtcagctgagatggtgacgtggccttggaaggacgggctgtagttggtataagagtcactaggatcaatcctccccatccactccaagcctttcccgggcatctggcgcacccagctgatccagtagctggtaaagctgtatccagaacccttacaggagatcctcagagactccccgggctttttcacctctgctccagactgcaccagctgcacttcggcacagactccgtctcctaagcaatccctgagcgggctggcaaggc

SEQ ID NO: 2724 - DNA, 495 bp, Artificial Sequence
  source: /note="Description of Artificial Sequence: Synthetic polynucleotide"
gcctccctcgcgccatcaggtctcctagcttagtaccagccacacagacccccgggctgagacccaggcagggaggggtgacgttcccagggagacggtggccgggctgccctggccccagtgctccaagcacttgtcgacgtctcctagcttagtatcaacagtaatacacagccgtgtcctcgggagtcacagagttcagctgcagggagaactggttcttggatgtgtctgggttgatggttattcgacttttcacagatactgcataatcattataccacttggacctgtagtatgtccttcccagccactcaaggcctctcgatggggactgcctgatccagttccaagcagcactgttgctagagacactgtccccggagatggcacaggtgagtgagagggtctgcgagggcttcaccagtcctggacctgactgctgcagctgtacctgtgagtctcctagcttagtactgagcgggctggcaaggc

SEQ ID NO: 2725 - DNA, 495 bp, Artificial Sequence
  source: /note="Description of Artificial Sequence: Synthetic polynucleotide"
gcctccctcgcgccatcaggtctcctatgaccttgccagccacacagacccccgggctgagacccaggcagggaggggtgacgttcccagggagacggtggccgggctgccctggccccagtgctccaagcacttgtcgacgtctcctatgaccttgtcaacagtaatacacggcagtgtcctcagcctttaggctgcagatctgcagatatgccgtgctgacagaggtgtccaaggagaagacaaaccgtcctgtgaagccctgggcatacgttgggttcccagtgttggtgttgatccatcccatccactcaagcccttgtccaggggcctgtcgcacccaattcatagcatagctagtgaaggtgtatccagaagccttgcaggaaaccttcactgaggccccaggcttcttcaactcagacccagattgcaccagctgcacctgggagtgggcaccgtctcctatgaccttgctgagcgggctggcaaggc

SEQ ID NO: 2726 - DNA, 495 bp, Artificial Sequence
  source: /note="Description of Artificial Sequence: Synthetic polynucleotide"
gcctccctcgcgccatcaggtctcctacaaggtcaccagccacacagacccccgggctgagacccaggcagggaggggtgacgttcccagggagacggtggccgggctgccctggccccagtgctccaagcacttgtcgacgtctcctacaaggtcatcaacagtaatacatggccatgtcctcagcctttaggctgctgatctgcaggtatgctgtgctggcagaggtgtccatggagaagacaaaccgtcctgtgaagccctgggcatatgttgggttcccagtgtaggtgttgaaccatcccatccactcaagcccttgtccaggggcctgtggcacccaattcataccataggtggtgaaactgtaaccagaagccttgcaggagaccttcactgaggccccaggctgcttcacctcatggccagactgcaccagctgcacctgggagtaggtaccgtctcctacaaggtcactgagcgggctggcaaggc

SEQ ID NO: 2727 - DNA, 495 bp, Artificial Sequence
  source: /note="Description of Artificial Sequence: Synthetic polynucleotide"
gcctccctcgcgccatcaggtctcctacactgtacccagccacacagacccccgggctgagacccaggcagggaggggtgacgttcccagggagacggtggccgggctgccctggccccagtgctccaagcacttgtcgacgtctcctacactgtactcagggaatgtgcggccctgcccttggccatcacggagctcagctgcagggataactgggccttggatgtgtctctacagatggagagttggcccagaaaggctgggctgaagtgtgtgctgcccctggagctgaggtgccccagcgccttcccagagggctgctgggtccaggcccagaggtctgtgaggacctcaccagccctgggcatgactccagtagctgcatctgatgcaggacactcagggacaagaagcaaagagatgagtcacaagcggacaccacagcccacagcccccgttcgtctcctacactgtacctgagcgggctggcaaggc

SEQ ID NO: 2728 - DNA, 495 bp, Artificial Sequence
  source: /note="Description of Artificial Sequence: Synthetic polynucleotide"
gcctccctcgcgccatcaggtctcctagatgatccccagccacacagacccccgggctgagacccaggcagggaggggtgacgttcccagggagacggtggccgggctgccctggccccagtgctccaagcacttgtcgacgtctcctagatgatcctcagtataaaaatccatggtggtttactcattgtgcgggtagctcagctgtaggaaaaactgttttctgaatgtggatctggaggtggtgactggactcttgagaagcgggttgcactgtgtgtttcctcgtgacctacacacctgacccacttcagcttcttccctgggggctggcagatacagctccaggaggaagtactggttatgattggaaatccagagacagcacaggtgaaggagagggtctctgagggctttactagaacatgagtgcactgaaaaacacaatttttttcatagggtctcctagatgatccctgagcgggctggcaaggc

SEQ ID NO: 2729 - DNA, 495 bp, Artificial Sequence
  source: /note="Description of Artificial Sequence: Synthetic polynucleotide"
gcctccctcgcgccatcaggtctcctacgccaataccagccacacagacccccgggctgagacccaggcagggaggggtgacgttcccagggagacggtggccgggctgccctggccccagtgctccaagcacttgtcgacgtctcctacgccaatatcaataaaaatcatggttgtgtactccttgttaaggtagctcagctgtaggagaaactgttttttggatgtggatctggagatggtgactggactcttgaggagtgggttggattgtgcactccctcatgacctgtgcacctgattcgctccagtcccttccccggggggtgacggatccagctccagcaggaagcactggttgtaatggagaagcagagatgccacaggccagggggaggatctgtgagggcttcaccaggccaggagtgcaccgagaatcacagttgtcggcatgcacagggtctcctacgccaatactgagcgggctggcaaggc

SEQ ID NO: 2730 - DNA, 495 bp, Artificial Sequence
  source: /note="Description of Artificial Sequence: Synthetic polynucleotide"
gcctccctcgcgccatcaggtctcctatcaagcctccagccacacagacccccgggctgagacccaggcagggaggggtgacgttcccagggagacggtggccgggctgccctggccccagtgctccaagcacttgtcgacgtctcctatcaagccttcacagtaatactcagccgtgtcctaggtggtcatggagctgagcttcacagagaactggctcttggttgagtcactgttgatggggacatggacctgggtggagggtgcatgatgtgtattccttgatgatccagtctagtaactgtgccccagccattccagcctgttgcccacgggatggtggattcatctcaaataatatccatggtaaaaaaaagaatccagacacagcacaggcagagggcagtgtctgagggcctcatgggtcctggacctgactcctgcagctgcacctgggacagtctcctatcaagcctctgagcgggctggcaaggc

SEQ ID NO: 2731 - DNA, 495 bp, Artificial Sequence
  source: /note="Description of Artificial Sequence: Synthetic polynucleotide"
gcctccctcgcgccatcaggtctcctaacgtgtgtccagccacacagacccccgggctgagacccaggcagggaggggtgacgttcccagggagacggtggccgggctgccctggccccagtgctccaagcacttgtcgacgtctcctaacgtgtgttcacttaaaaatgcgtagttgtgtgttcactgggcacagagctcagctgtaagaactgtttcttggatctggatatggactcttgagcagtgggttgtaatttgtgctcccttcacaacccatgcacctgatccactcctgtccatcttctaggggcaagcagatacaattctagcaggaaacactggttatgatggggaatccagagacagtgcaggtgaggagagggtctgcaaggagtctcaagccagaagtgtgctgagaaacatagttgttgatgttaacaggttctgggcaacacaggtctcctaacgtgtgtctgagcgggctggcaaggc

SEQ ID NO: 2732 - DNA, 495 bp, Artificial Sequence
  source: /note="Description of Artificial Sequence: Synthetic polynucleotide"
gcctccctcgcgccatcaggtctcctatccgtctaccagccacacagacccccgggctgagacccaggcagggaggggtgacgttcccagggagacggtggccgggctgccctggccccagtgctccaagcacttgtcgacgtctcctatccgtctatcagctctaaaatacatggctatgtgtttgttcctcacatagttcagctgtaagaagaactactttttggacatggatctggagatggtgactggactcttgagaagaggggagtaatttgtgctccctccatgacctatgcacccgatccactccagtacctcccatgggggcgctgatggatgcagctccagcaggaaacactggttgtgatggagaatgcagagatggcacaggtgagggagaggttctgtgaaggcttcaccaggccaagagtgcaccgagaaatacagttgttggcaggtctcctatccgtctactgagcgggctggcaaggc

SEQ ID NO: 2733 - DNA, 495 bp, Artificial Sequence
  source: /note="Description of Artificial Sequence: Synthetic polynucleotide"
gcctccctcgcgccatcaggtctcctaaagagctgccagccacacagacccccgggctgagacccaggcagggaggggtgacgttcccagggagacggtggccgggctgccctggccccagtgctccaagcacttgtcgacgtctcctaaagagctgtcattcaaaatgtgtagttgtgtgttcactgggcacagagctcagctgtaagaactgtttcttggatctggatatggactcttgagaagtgggatgtaatttttgctccctttacaacccatgaacctgatccactcctgtccatcttctaggggcaagcagatacaattctagcaggacacactggttatgatggggaatccagagacagtgcaggtgagggagagggtctgtgaggatgtctcaagccagaagtgcactggaaaacacagttgttgatgttaacagtttctggacaacacggtctcctaaagagctgctgagcgggctggcaaggc

SEQ ID NO: 2734 - DNA, 495 bp, Artificial Sequence
  source: /note="Description of Artificial Sequence: Synthetic polynucleotide"
gcctccctcgcgccatcaggtctcctatatcgctcccagccacacagacccccgggctgagacccaggcagggaggggtgacgttcccagggagacggtggccgggctgccctggccccagtgctccaagcacttgtcgacgtctcctatatcgctctcagctctaaaatacatggctatgtgtttgttgctcacatagttcacctgtaagaagaagtactttttggacatggatctggagatggtgactggactcttgagaagaggggagtaatctgtgctccctccatgacctatgcacccgatccactccagtacctcccatgggggcgctgatggatgcagctccagaaggaaacactggttgtgatggagaatgcagagatggcacaggtgagggagaggttctgtgaaggcttcaccaggccaagagtgcaccgagaaatacagttgttggcaggtctcctatatcgctcctgagcgggctggcaaggc

SEQ ID NO: 2735 - DNA, 495 bp, Artificial Sequence
  source: /note="Description of Artificial Sequence: Synthetic polynucleotide"
gcctccctcgcgccatcaggtctcctatcagatgcccagccacacagacccccgggctgagacccaggcagggaggggtgacgttcccagggagacggtggccgggctgccctggccccagtgctccaagcacttgtcgacgtctcctatcagatgctcatgaaagaagaattcatgtgcagacacatctgcttgtctgaagatatagtgcatgtgggaacatgtgggcttgtctgaattcatgataagtgggctggaattcatcctccactcatcacgtatgcacctgacccactcctgtgctttccatccagtgcctacaggaagcactgattgtgacagagaatccagaggcagcacaggtgagtgagggggtttgcaagggcttcaccaggctgataattgactgagaaaaacagttgttagcatgcacaagttctggatgatacattggaaacccgtctcctatcagatgcctgagcgggctggcaaggc

SEQ ID NO: 2736 - DNA, 495 bp, Artificial Sequence
  source: /note="Description of Artificial Sequence: Synthetic polynucleotide"
gcctccctcgcgccatcaggtctcctagtgtagcaccagccacacagacccccgggctgagacccaggcagggaggggtgacgttcccagggagacggtggccgggctgccctggccccagtgctccaagcacttgtcgacgtctcctagtgtagcatcaacagtaatacaaaccatgtcctcagatgtcacagagctcaggtatagtcaaaattgtttcttggatgaatctctggagaaggagagttggctctgcagagatggatcatcgtgtgtgtcacccttgcaatgtgttcctgacagcccatggaagcgggctagtggattcagctccagcagtaactgttggttgggatggacaacccagaaatggggcatgtgaggaagagaaaatgaaagtggatagcctgttaccgaaaactgctggactaagacacttgtaagcctgtcaatctcagtggtctcctagtgtagcactgagcgggctggcaaggc

SEQ ID NO: 2737 - DNA, 495 bp, Artificial Sequence
  source: /note="Description of Artificial Sequence: Synthetic polynucleotide"
gcctccctcgcgccatcaggtctcctatggcagttccagccacacagacccccgggctgagacccaggcagggaggggtgacgttcccagggagacggtggccgggctgccctggccccagtgctccaagcacttgtcgacgtctcctatggcagtttcacagccaagatatggaaactaagtgtctgtcaatgggcaaatggataaagacaatgtggtatgtgtacacaacatagcattattatgccttataaaataaggaaatgctgccattttccacaagacaaatggactcccaccaccactagcaatggattttatccattgcagcccctccctgagagccggcagatccaggtccactagtaaggactggttgtgacggagtggccagtaacagtgtaggtgaggcagagggtaagtgtgtgctattcaggtccagggctgactcctgcagctggtctcctatggcagttctgagcgggctggcaaggc

SEQ ID NO: 2738 - DNA, 495 bp, Artificial Sequence
  source: /note="Description of Artificial Sequence: Synthetic polynucleotide"
gcctccctcgcgccatcaggtctcctacagtccaaccagccacacagacccccgggctgagacccaggcagggaggggtgacgttcccagggagacggtggccgggctgccctggccccagtgctccaagcacttgtcgacgtctcctacagtccaatcagtgtaaaaattcatggttgtgtactcgttgctcaggtagctcagctgtagaagaaactgtgttttggatgtggatctggagatggtgactggactcttgaggcgtgggttgcgttgtgttctccctcatgacctgtgcacctgattcactccagtcccttccctggggagctgagggatccagctccagcaggaagcactggttgtgatggagaagcagagacagcacagatgagggagagggtctgtgagggcttcgccaggccaagaacgcacgagaaatacagatgtcggcatgcacgtctcctacagtccaactgagcgggctggcaaggc

SEQ ID NO: 2739 - DNA, 495 bp, Artificial Sequence
  source: /note="Description of Artificial Sequence: Synthetic polynucleotide"
gcctccctcgcgccatcaggtctcctagtgtctacccagccacacagacccccgggctgagacccaggcagggaggggtgacgttcccagggagacggtggccgggctgccctggccccagtgctccaagcacttgtcgacgtctcctagtgtctactcaagtaatacaaggttgtggcattgttggtcacagaactcagctaaaagaaaatttggttcttggacgtggatctggagatggtgactgagctcatgaggagtgggttagaatttgtgctccctcgtgacctatgccctgatccactcccttgactgaggactggcggatccagctccagcaggaagcactagttgtgatggagaatccagagacagcacaggtgagggagggggtctgtgagggcctcaccaggccaataaatgaccatgaaacacagtggttggtgtgcatggcttctgggtctcctagtgtctacctgagcgggctggcaaggc

SEQ ID NO: 2740 - DNA, 495 bp, Artificial Sequence
  source: /note="Description of Artificial Sequence: Synthetic polynucleotide"
gcctccctcgcgccatcaggtctcctagtacagtgccagccacacagacccccgggctgagacccaggcagggaggggtgacgttcccagggagacggtggccgggctgccctggccccagtgctccaagcacttgtcgacgtctcctagtacagtgtcataaaaatacatggctgtgtgcttgtgactcacttagctcggctgtaggaagaactgctttttggacatggatctggagatggtgactggactcttgaggagtgggttggaatgtgcactccctcatgacctgtgcactggattcactccagtcccttcctggggggtttatgaatgcagctacagcaggaagcactggttgtgatggggaatccagagacagcacaggtgagggagagggtctgtgagggcttcaccaggccaagtgggcactgagaaacacagttgttggcatgcacaggtctcctagtacagtgctgagcgggctggcaaggc

SEQ ID NO: 2741 - DNA, 495 bp, Artificial Sequence
  source: /note="Description of Artificial Sequence: Synthetic polynucleotide"
gcctccctcgcgccatcaggtctcctaggatcatcccagccacacagacccccgggctgagacccaggcagggaggggtgacgttcccagggagacggtggccgggctgccctggccccagtgctccaagcacttgtcgacgtctcctaggatcatctcatttaaaacatggctgtgagcttgttgctcacatagctccactgtaaaaacaagtgttttttggacccgaatttggagatggtgactggattcataaggagtgggtgggaatttttgctcccttcatgacgtgtgcgcctggtccactccagtccttcccatgtggactcgtggatccagctccagcaggaaacactggttgtgatggaaaatccagagacagcacaggtgagggagagggtctgcgagggctccaccaggccaagagtgcactaagaaacacagttgtttgtgagcacaggtctcctaggatcatcctgagcgggctggcaaggc

SEQ ID NO: 2742 - DNA, 495 bp, Artificial Sequence
  source: /note="Description of Artificial Sequence: Synthetic polynucleotide"
gcctccctcgcgccatcaggtctcctatattggcgccagccacacagacccccgggctgagacccaggcagggaggggtgacgttcccagggagacggtggccgggctgccctggccccagtgctccaagcacttgtcgacgtctcctatattggcgtcatgaaaaatatatggctatgtgattgttgctcatgtagctcagctgtaggaagaactgtttttggacatggatctggggatggtgactggactcttgaggaaaggggagtaatgtgtgctcccttcatcatctatggacccaatccactccattccctcccagagagggggtgatggatgcagatccaggaggaagcactggttgtgatggagaatgcagagatgacacacatgagggagagggtctttgggggcttcaccaggccaagagtgcaccgagaaacacagttgttggcaggcagtctcctatattggcgctgagcgggctggcaaggc

SEQ ID NO: 2743 - DNA, 495 bp, Artificial Sequence
  source: /note="Description of Artificial Sequence: Synthetic polynucleotide"
gcctccctcgcgccatcaggtctcctaaggcttgaccagccacacagacccccgggctgagacccaggcagggaggggtgacgttcccagggagacggtggccgggctgccctggccccagtgctccaagcacttgtcgacgtctcctaaggcttgatcaattaaaattcatggttgtgtacttgttgctcaggtagctcagctacaggaaacactgttttttggatgtggatctggagatagtgactggactcttgaggagtgggttggaatgtgcactccctcatgacctgtgcacctgattcgctccagtcccttccttgcggggggtgatggatgcagctccagcaggaagcactggttgtgatggagaatgcagagacagcacaggtgagagagagggtctgtgagagcttcactagcccaagagtgcaggagaaacacagttgttggcatgcacgtctcctaaggcttgactgagcgggctggcaaggc

SEQ ID NO: 2744 - DNA, 495 bp, Artificial Sequence
  source: /note="Description of Artificial Sequence: Synthetic polynucleotide"
gcctccctcgcgccatcaggtctcctaacacacgtccagccacacagacccccgggctgagacccaggcagggaggggtgacgttcccagggagacggtggccgggctgccctggccccagtgctccaagcacttgtcgacgtctcctaacacacgttcagcttaaaaatacatggctatgtgcttgttgctcatgtagctcagctgtaggaagaactgcttttttggacacggatctggggatggtgactggacacttgaggagtgggtggtaatgtgtgctcccttcatgacctatgcacccaatccactccattcccttccctggggggctgatggatccagcttcagcaggaagacctcgttatcacggggaacacagacacagcgcaggtaagggagagggtctgtgagggcttcaccaggccaagagtgcgctgagaaacacagttgttggcatgtctcctaacacacgtctgagcgggctggcaaggc

SEQ ID NO: 2745 - DNA, 495 bp, Artificial Sequence
  source: /note="Description of Artificial Sequence: Synthetic polynucleotide"
gcctccctcgcgccatcaggtctcctatagacggaccagccacacagacccccgggctgagacccaggcagggaggggtgacgttcccagggagacggtggccgggctgccctggccccagtgctccaagcacttgtcgacgtctcctatagacggatcaagtaatacatgaccttgtccttggctttcagattggtcattgtaaggcagactgcacttaaaagggtgttgcttgagattgttaatttatttgtactcatggaaagtaaccctgagaattcatacttgatcactcactgttggcacccacacctatccctgttgtgaagcgtgctggaccaagctcatgctgtaaccagtaaaggtgaaaccagaggctttgcaggagagtctcaccactgggctgtaaattttttccccctctgactccatcagtaaacttcacacaggacttccgtgagtctcctatagacggactgagcgggctggcaaggc

SEQ ID NO: 2746 - DNA, 495 bp, Artificial Sequence
  source: /note="Description of Artificial Sequence: Synthetic polynucleotide"
gcctccctcgcgccatcaggtctcctagagcgataccagccacacagacccccgggctgagacccaggcagggaggggtgacgttcccagggagacggtggccgggctgccctggccccagtgctccaagcacttgtcgacgtctcctagagcgatatcaagtaatacactgcctactcctcagctttccagtagataattttaagggagattgtgatgttaagtgttgtccccaggaactgtgaatcttctttgtgctggagcagagcaccactgagaacttccacttgggtcactcatggctaccacccactccagcccctctcctccagccatcagggcccaataaatgctgcagtcagtgaaggtgaatcttgatgctttgcagaagaagctaagagaatagccaggctattttgccaaagacaaaaatatagatccagtaaacctttgtggttttgtctcctagagcgatactgagcgggctggcaaggc

SEQ ID NO: 2747 - DNA, 495 bp, Artificial Sequence
  source: /note="Description of Artificial Sequence: Synthetic polynucleotide"
gcctccctcgcgccatcaggtctcctagcatctgaccagccacacagacccccgggctgagacccaggcagggaggggtgacgttcccagggagacggtggccgggctgccctggccccagtgctccaagcacttgtcgacgtctcctagcatctgatcaagtaatacacggacttttcctgagctctcaggttaatcatcttaaaagagaatctcctgaactgagtgtatttgaggattgttaatcatctttttactcaaggagagtcccactgagaacttctatttgaattattgttattacccacacccacccctgtcatgaagcctgctggatcaagcttatgctgttttcagtgaaagtgaatccagaggctttgcagaaaaggcagaattcctggtctgtagtatttctctgtctaactccattagttaacttcacaggggacttctgaaaacagtctcctagcatctgactgagcgggctggcaaggc

SEQ ID NO: 2748 - DNA, 495 bp, Artificial Sequence
  source: /note="Description of Artificial Sequence: Synthetic polynucleotide"
gcctccctcgcgccatcaggtctcctatgctacacccagccacacagacccccgggctgagacccaggcagggaggggtgacgttcccagggagacggtggccgggctgccctggccccagtgctccaagcacttgtcgacgtctcctatgctacactcaagtattacaaggccttgtccttgactttcagtttggtccctttaaggtagactgcacatgaaaaggtgtcgcttgggactgttaatttatttgtactcatggagagtaactctgagaactcccacttgatcactcactgtttccacccacaccaatccctgtcatgaagcctgctggaccaagctcatgctgtagccagtaaaggtgaaatcagaggctttgcatgagagtctcagtgaaccactgggctgtacaattttcccccctgactctatcagtaaatttcacacaggacttctggtctcctatgctacacctgagcgggctggcaaggc

SEQ ID NO: 2749 - DNA, 495 bp, Artificial Sequence
  source: /note="Description of Artificial Sequence: Synthetic polynucleotide"
gcctccctcgcgccatcaggtctcctaaactgccaccagccacacagacccccgggctgagacccaggcagggaggggtgacgttcccagggagacggtggccgggctgccctggccccagtgctccaagcacttgtcgacgtctcctaaactgccatcactgtaatatacggccttgcccttggctttcaggttggtccttgtaaggtagactgcacttgaaagggtgtcacttgggaatgttgatttatctgtactcatggagagtaacccttagaactcccatatgatctctcactgttgctacccacaccaattcctgttgtgaagcgtgctggaccaagctcatgctgcacccagtaaacccgaaaccagaggctttgcaggacagtctcagtgaactgctgggctgttaaatttttctccttctgactccatcagtaaacatcacacaggacttgtctcctaaactgccactgagcgggctggcaaggc

SEQ ID NO: 2750 - DNA, 495 bp, Artificial Sequence
  source: /note="Description of Artificial Sequence: Synthetic polynucleotide"
gcctccctcgcgccatcaggtctcctattggactgccagccacacagacccccgggctgagacccaggcagggaggggtgacgttcccagggagacggtggccgggctgccctggccccagtgctccaagcacttgtcgacgtctcctattggactgtcaagtaatacacagacttgtcttgggctctcagttttattatcttaaaagagaatcttctgaacagtgtctctgaggactgttaatcttctttgtactgaaggcgagtcccattgagaacttccacttgaattactgttatctccctcaccaacacttgccatgaatcctgctggaccaaacttgttcttttttcagtgaatccaggggctttgcagaacagtctgagaattcttggtctgtagtattttcctgtctgactccactagttaacttcacagaggacttctgcacacacagagggtctcctattggactgctgagcgggctggcaaggc

SEQ ID NO: 2751 - DNA, 495 bp, Artificial Sequence
  source: /note="Description of Artificial Sequence: Synthetic polynucleotide"
gcctccctcgcgccatcaggtctcctatcggtactccagccacacagacccccgggctgagacccaggcagggaggggtgacgttcccagggagacggtggccgggctgccctggccccagtgctccaagcacttgtcgacgtctcctatcggtacttcacagtaataaacggaattttcctgagctctcaggttaatcatcttaagagagaatcatctgaaaagcgtgtctctgaggactgttaatcttctttgtactcaaggagagtcccactgagaacttccacttgaattactgatgttatcacctacacccacccctgtcatgaagcctgctggaccaagcttatgctgttttcagtgaaagtgaatccacagggtttccagaaaagtctgagaattcttggtctgtagtatttctctgagagactccagtaattaacttcacaggggacctctggtctcctatcggtactctgagcgggctggcaaggc

SEQ ID NO: 2752 - DNA, 495 bp, Artificial Sequence
  source: /note="Description of Artificial Sequence: Synthetic polynucleotide"
gcctccctcgcgccatcaggtctcctaccatggatccagccacacagacccccgggctgagacccaggcagggaggggtgacgttcccagggagacggtggccgggctgccctggccccagtgctccaagcacttgtcgacgtctcctaccatggattcacacagttaaatgctgccatgttctgggttctcaggctgttcatttgcatgtacagcatgtacttggtgttgtctctggaagtggtgagtctgcccctaacatagtctgcattgtattgatgactttcactacgccatataactgcaacccattccagccccttccctgaggcctggcaaacccagtgaatctcatagatactgaaggtgaaccaagaggctgcacaggagagcctcaggggcccctctcagtgtaccaagtctcccccagactctgtaagctgggcctcaccctggatacgtctcctaccatggatctgagcgggctggcaaggc

SEQ ID NO: 2753 - DNA, 495 bp, Artificial Sequence
  source: /note="Description of Artificial Sequence: Synthetic polynucleotide"
gcctccctcgcgccatcaggtctcctaacgaagatccagccacacagacccccgggctgagacccaggcagggaggggtgacgttcccagggagacggtggccgggctgccctggccccagtgctccaagcacttgtcgacgtctcctaacgaagattcacagtaatacactgcctacccctgtgagagccccctcagcttccaagtagattattttaagggagactgtgctggtaattggtgtccctgggaattgtgaatcttcattatgctgatgcagaatatcactgagaacttccacttgaatcaatcactgttaccacccactccagcctctgtcccccagccatctgggctcaatttatgctgtagtcagtgaaggtgaatcttgatgctttgcaaaagaggctaagagaacagccaggctgttttgccaaagataaaaatatagatccagtaagtctcctaacgaagatctgagcgggctggcaaggc

SEQ ID NO: 2754 - DNA, 495 bp, Artificial Sequence
  source: /note="Description of Artificial Sequence: Synthetic polynucleotide"
gcctccctcgcgccatcaggtctcctaactgtggaccagccacacagacccccgggctgagacccaggcagggaggggtgacgttcccagggagacggtggccgggctgccctggccccagtgctccaagcacttgtcgacgtctcctaactgtggatcaacagtattacacaaccttgtccttggctttcaggttagtcattgtaaggtagagtgcacgtgaaagggtgtcgctggaccagttaatttatttgtactcatgaagagtaaacctgagcactcccacttgttgactcactgttgccagccaccacaatccctgttgtgaagcctgctggaccaacctcaggctgttgccagaaaaggtgaatccagacgctttgcaagaaagtctcagtgaaccactgggctgtactacgtttacccctctgactccaccactgaacttcatacaggacttgtctcctaactgtggactgagcgggctggcaaggc

SEQ ID NO: 2755 - DNA, 495 bp, Artificial Sequence
  source: /note="Description of Artificial Sequence: Synthetic polynucleotide"
gcctccctcgcgccatcaggtctcctaggtgtcatccagccacacagacccccgggctgagacccaggcagggaggggtgacgttcccagggagacggtggccgggctgccctggccccagtgctccaagcacttgtcgacgtctcctaggtgtcattcaagtaatacatggccttctcctcggctctcaggttggtcattttgagggagactgtgctgacaagggtgtccctgaggattatgatttttctttgtattgatggagggtaccactaacaaattccacttgaatccctcgcttttgcctcccacaccaacccctgtcctgaagcctgctgggctgagctcatgctagagtcaatgaaggtaaattcagaggctttgtaaaaaaggctctgagaacagttaggctgtatcatttctcttccagattccaccagtgaacttcttgtaggactctgtctcctaggtgtcatctgagcgggctggcaaggc

SEQ ID NO: 2756 - DNA, 495 bp, Artificial Sequence
  source: /note="Description of Artificial Sequence: Synthetic polynucleotide"
gcctccctcgcgccatcaggtctcctatcgtgaagccagccacacagacccccgggctgagacccaggcagggaggggtgacgttcccagggagacggtggccgggctgccctggccccagtgctccaagcacttgtcgacgtctcctatcgtgaagtcacagtaatacaaggtcttgtccttggctttcacattggtcattttaaggtagactgcacttgaaagggtgttgcttgggactgttaatttacttgtactcatggagagtaaccctgataactcactgttgccacccacacaaatccctgtcatgaagcctgctggaccaagctcatgctgtagccagtacaagtgaaatcagaggctttgcaggagagtctgtgagaaccgctgggctgtacaatgtttccccctctgactccatcagtaagcttcaacaggacttacatgaacacagagggtctcctatcgtgaagctgagcgggctggcaaggc

SEQ ID NO: 2757 - DNA, 495 bp, Artificial Sequence
  source: /note="Description of Artificial Sequence: Synthetic polynucleotide"
gcctccctcgcgccatcaggtctcctacactagctccagccacacagacccccgggctgagacccaggcagggaggggtgacgttcccagggagacggtggccgggctgccctggccccagtgctccaagcacttgtcgacgtctcctacactagcttcacacagtaatacacgcctgcatccccagccatcacacttctcagctgtaagttttcttgttttttactatgtgtttctggagatgctagctctgccctgaaggttggggcttagtgtttcccttaacccatatcacaccaacacactgaagaccttttgatgggagatggtggatccaggaaacagaatgttcagaaattgaatgtgcataggcggcataggtgaggctgagcatgaccaaggggaccactacttcttcctcccattgcacaaggtggtcctcactgtgaacccctgagaagtctcctacactagctctgagcgggctggcaaggc

SEQ ID NO: 2758 - DNA, 495 bp, Artificial Sequence
  source: /note="Description of Artificial Sequence: Synthetic polynucleotide"
gcctccctcgcgccatcaggtctcctaggtcaactccagccacacagacccccgggctgagacccaggcagggaggggtgacgttcccagggagacggtggccgggctgccctggccccagtgctccaagcacttgtcgacgtctcctaggtcaacttcagcacagtagtacacatctatgtcctcagatctctgactgctcagctccatgtaggctgtgctcgtggacgtgtccctggtcatggtgactctgccctgaaacttctgtgcatagcctgtgttaccattgccagagtagctccctaccatccattcaaacccttatccaggggcctgtcacacacagtgaatgtcgtagctggcgaaggtgtatccagagctttgcaggagaccttcactgaggccatggacgctggcaacaggagagtcatcagaagctgggtgagtcatataatcaggagtctcctaggtcaactctgagcgggctggcaaggc

SEQ ID NO: 2759 - DNA, 495 bp, Artificial Sequence
  source: /note="Description of Artificial Sequence: Synthetic polynucleotide"
gcctccctcgcgccatcaggtctcctatacgtacgccagccacacagacccccgggctgagacccaggcagggaggggtgacgttcccagggagacggtggccgggctgccctggccccagtgctccaagcacttgtcgacgtctcctatacgtacgtcaacaggaatacacgaccatgtcttcagatctcaggctgctcagctccatgtaggctgtgctcacggacctgtcactggtaatggtgactctgccccggaacttctgtgcgtagtgtgtgttatcattgtaagggttgatgcatcccaaccactatgcccttgtccagggccctgtcgcacccactgtgtaaagtatttggtgaaggtgtatctggaagcctggccaggagaccttcactgaggacgcaggcttcttcacctcagccccaggctgcaacagctgaacctgggaatggacatcgtctcctatacgtacgctgagcgggctggcaaggc

SEQ ID NO: 2760 - DNA, 495 bp, Artificial Sequence
  source: /note="Description of Artificial Sequence: Synthetic polynucleotide"
gcctccctcgcgccatcaggtctcctaatgacaccccagccacacagacccccgggctgagacccaggcagggaggggtgacgttcccagggagacggtggccgggctgccctggccccagtgctccaagcacttgtcgacgtctcctaatgacacctcacacagtaatacatggccgtgtcttcagatctcaggctgctcagctccatgtaggctgtgctcgtggatgtgtccctggtcatggtgactctgccctggaacttctctgcgtagcttatgctgccatcactagggcacatccttcccatccactcaagcccttgtgcatgggcctggcgcacctagtgcatagagtaactggtgaaggtaggtgtatccacaagtcttgcaggagactttcactgatgccccagccttcttcatctcatccccagactgcaccagctgcacctgggactgggtctcctaatgacaccctgagcgggctggcaaggc

SEQ ID NO: 2761 - DNA, 495 bp, Artificial Sequence
  source: /note="Description of Artificial Sequence: Synthetic polynucleotide"
gcctccctcgcgccatcaggtctcctacttcacgaccagccacacagacccccgggctgagacccaggcagggaggggtgacgttcccagggagacggtggccgggctgccctggccccagtgctccaagcacttgtcgacgtctcctacttcacgatcacccagtaatacacagccgagtcctcagatctcaggctgctcagctctatgtaggctgtcctcagggacatgtccctggtaatggtgactctgccctggaacttctttgcatagttggtgttaccattgtaaagtgtgatccatctcatcctttcaagcccttgtccaggggcctgttgcaaccagtgcaaggagcagcaagtgaaggtgtatccggaagccttgcaggagaccttcactgaggccccaggcttctttacctcagcctcagactgccccagctgcacctgggagcagacacgtctcctacttcacgactgagcgggctggcaaggc

SEQ ID NO: 2762 - DNA, 495 bp, Artificial Sequence
  source: /note="Description of Artificial Sequence: Synthetic polynucleotide"
gcctccctcgcgccatcaggtctcctaagaatcagccagccacacagacccccgggctgagacccaggcagggaggggtgacgttcccagggagacggtggccgggctgccctggccccagtgctccaagcacttgtcgacgtctcctaagaatcagtcacacagtaatacacgaccatgtcttcagatctcaggctgctcagctccatgtaggctgtgctcatggacctgtcactggtaatggtgactctgccccagaacgtctgtgcatagtgtgtgttatcattgtaagggttgattcatcccatccactatgcccttgtccagggctttgtcacacccaccgtgtaaagtatttggtgaaggtgtatctggaagcctggcaggagaccttcactgaggacccaggcttcttcacctcagccccaggctgcaacagctgaacctgggaatggacaccgtctcctaagaatcagctgagcgggctggcaaggc

SEQ ID NO: 2763 - DNA, 495 bp, Artificial Sequence
  source: /note="Description of Artificial Sequence: Synthetic polynucleotide"
gcctccctcgcgccatcaggtctcctaagttatgcccagccacacagacccccgggctgagacccaggcagggaggggtgacgttcccagggagacggtggccgggctgccctggccccagtgctccaagcacttgtcgacgtctcctaagttatgctcatgcacagtaatgtgtggctgtgtccacaatgtccatgttgatcactgttagaaccacttcattcttggaggtgtccttggagataatgagcctactcttcagagatgggctgtagtatttattatcattctaataaatgtgtgcaagccactccagggcctttgctgagggctgacagatctaacccacacccattccagaagtgctgagtgagaacccagagaaggtgcaggtcagcatgagggtctgtgtgggtttcaccagtgcaggaccagactccttcaaggtgacctgggataagtctcctaagttatgcctgagcgggctggcaaggc

SEQ ID NO: 2764 - DNA, 495 bp, Artificial Sequence
  source: /note="Description of Artificial Sequence: Synthetic polynucleotide"
gcctccctcgcgccatcaggtctcctaaggtctcaccagccacacagacccccgggctgagacccaggcagggaggggtgacgttcccagggagacggtggccgggctgccctggccccagtgctccaagcacttgtcgacgtctcctaaggtctcatcacagagtcatatgcagctgcatcctctgccctcagtctgttcatttgcagatacagtgagtttttggtattgtctctggaaatggtgaatcggcccttcacagagtctgcgtagtacatggtactaccactaccactaataactgggacccactgcagacccttccctggagcctgggggacccagtgcgtgctatggctactgaaggtgaatccagaggctgcacaggagagtctcagggacacccaggctttgtcaagtttgctccagactctaccagctgcatctcacactggacaccgtctcctaaggtctcactgagcgggctggcaaggc

SEQ ID NO: 2765 - DNA, 495 bp, Artificial Sequence
  source: /note="Description of Artificial Sequence: Synthetic polynucleotide"
gcctccctcgcgccatcaggtctcctagtcatagtccagccacacagacccccgggctgagacccaggcagggaggggtgacgttcccagggagacggtggccgggctgccctggccccagtgctccaagcacttgtcgacgtctcctagtcatagttcacacagtaatacacagccatgtcctcgggcctcaggctgttcatttgctgatacaggaagttcctggaattgtctctggagatgatgaatcggcccttcacagagtctgcatagtgcgtcctactgccattccaactaacacccgatacccactccagcccctttcctggagcctggcggacccagttcatgtcactgttactgaaggtgaatccagaggctgcacaggagagtctcagggaccccccaggctctaccaagcctcccccagactccaccagctgcactgttgtacccaggtgtctcctagtcatagtctgagcgggctggcaaggc

SEQ ID NO: 2766 - DNA, 495 bp, Artificial Sequence
  source: /note="Description of Artificial Sequence: Synthetic polynucleotide"
gcctccctcgcgccatcaggtctcctagtgacttgccagccacacagacccccgggctgagacccaggcagggaggggtgacgttcccagggagacggtggccgggctgccctggccccagtgctccaagcacttgtcgacgtctcctagtgacttgtcaacagtaatacacggccgtgtcctcggttttcaggctcttcatttgcagataggtgatgcttttggaatcatctcttgagattgtgaatctgcctttcacagacgtggtctattctgttgtcccaccattagctttgtttctaatgaaacctacccattccagccccttcccgggagcctggcggaccccgctcatgtagtagtaactgaaggtgaatccagaggctgcacaggagagtctcagggaccccccaggctgtaccaagcctcccccagactccaccagctgcacctcacactggtctcctagtgacttgctgagcgggctggcaaggc

SEQ ID NO: 2767 - DNA, 495 bp, Artificial Sequence
  source: /note="Description of Artificial Sequence: Synthetic polynucleotide"
gcctccctcgcgccatcaggtctcctagattgcagccagccacacagacccccgggctgagacccaggcagggaggggtgacgttcccagggagacggtggccgggctgccctggccccagtgctccaagcacttgtcgacgtctcctagattgcagtcaacactaatagagggccgtgtcctcggttttcaggctgttcatttgcagatgaagtgtgttcttggcgttatctctggaggtattgaatcggtccttaccggagtctatgaggtatgtgctacccccattaggattaacttgtcaaaccaactccagcccattccctggagcctggcggacacagttcatgtagtagctactgaaggtgaattgagaggctgcacaggagagtctcggggaccacgcaggctttgccaagcctcccccagactccaccagctgcatctcacactggataccgtctcctagattgcagctgagcgggctggcaaggc

SEQ ID NO: 2768 - DNA, 495 bp, Artificial Sequence
  source: /note="Description of Artificial Sequence: Synthetic polynucleotide"
gcctccctcgcgccatcaggtctcctaactatgacccagccacacagacccccgggctgagacccaggcagggaggggtgacgttcccagggagacggtggccgggctgccctggccccagtgctccaagcacttgtcgacgtctcctaactatgactcatgtacagccatacacagccatgtcctcagttctctgactgttcatttgcagatacagagagttcttagcattgtctttggagatggagaatctgcccttcacagagtctgcatggtgtatctgacttccatcatcttttatatctattactcactccagccccttgcctgcagactggtgaactgggctcattcagaagctactgaaggcgaatctagaggctacacaggagagtctcaggaacttcccaggttgtctcaggtcctctgtgggctctatcagctccacctcacactgaacgtctcctaactatgacctgagcgggctggcaaggc

SEQ ID NO: 2769 - DNA, 495 bp, Artificial Sequence
  source: /note="Description of Artificial Sequence: Synthetic polynucleotide"
gcctccctcgcgccatcaggtctcctaatggtcaaccagccacacagacccccgggctgagacccaggcagggaggggtgacgttcccagggagacggtggccgggctgccctggccccagtgctccaagcacttgtcgacgtctcctaatggtcaatcacatacagtaacacacagctgtgcccgctgctctcagactgttcattagcaaatacagtgagttcttggcattttctttggagatggtgaatttgctcttcaaagattatgcataacatatctgacttccatcacactgtatatctactactcactccagccccttccctggagcctgggaaaccgagttccttcagtagctactgaaggttaatccagagtctgcacaggagagtctcagggatcccccaggttgtcttgggtcctctccggactccacgagctgtacctctcactagacgtctcctaatggtcaactgagcgggctggcaaggc

SEQ ID NO: 2770 - DNA, 495 bp, Artificial Sequence
  source: /note="Description of Artificial Sequence: Synthetic polynucleotide"
gcctccctcgcgccatcaggtctcctagatggcttccagccacacagacccccgggctgagacccaggcagggaggggtgacgttcccagggagacggtggccgggctgccctggccccagtgctccaagcacttgtcgacgtctcctagatggctttcatgtatagccatacacggccacgtcctcagctctctgagtgttcatttgcagatacagagagttcttagcattgtctttggagatggagaatctgcccttcacagagtctgcatggtgtatctgacttccatcatcttttatatctattactcactccagccccttgcctggagactggtgaactcggctcattcagaagctactgaaggcgaatctagaggctacacaggagagtctcaggaacttcccaggttgtctcaggtcctctatggactctatcagctccacctcacactgaacgtctcctagatggcttctgagcgggctggcaaggc

SEQ ID NO: 2771 - DNA, 495 bp, Artificial Sequence
  source: /note="Description of Artificial Sequence: Synthetic polynucleotide"
gcctccctcgcgccatcaggtctcctaagcatatgccagccacacagacccccgggctgagacccaggcagggaggggtgacgttcccagggagacggtggccgggctgccctggccccagtgctccaagcacttgtcgacgtctcctaagcatatgtcacatacagtaacacacagctgtgccctctgctctcagactgttcatttgcaaatacagtgagttcttggcattttctttggagatggtgaatttgctcttcacagattgggcataacatatctgacttccatcacactgtatatctactactcactccagccccttccctggagcctgggaaaccgagctcattcagtagctactgaaggttaatccagagtctgcacaggagagtctcaaggatcccccaggttgtcttgggtcctctccggactccacgagctgtacctctcactagacgtctcctaagcatatgctgagcgggctggcaaggc

SEQ ID NO: 2772 - DNA, 495 bp, Artificial Sequence
  source: /note="Description of Artificial Sequence: Synthetic polynucleotide"
gcctccctcgcgccatcaggtctcctacatatgctccagccacacagacccccgggctgagacccaggcagggaggggtgacgttcccagggagacggtggccgggctgccctggccccagtgctccaagcacttgtcgacgtctcctacatatgcttcaagtaatacacagacctatcctcggctctgacgctgttcatttgcagatacagtgatttcttggcatcatctctggagagggtgaatcgacccttcacagagtctgcatagcttgtgctacctacacaacaactcataaatgagacctactccagccctttcccaggagcctgatggacccagctcatccagtacctaataaaggtactaaaggtgaatccagaggctgcaaaagaaagtctcagggacccccaggctataacaagcctcccaaagactccaccagctgcacctcacactggtctcctacatatgctctgagcgggctggcaaggc

SEQ ID NO: 2773 - DNA, 495 bp, Artificial Sequence
  source: /note="Description of Artificial Sequence: Synthetic polynucleotide"
gcctccctcgcgccatcaggtctcctatcgtcgatccagccacacagacccccgggctgagacccaggcagggaggggtgacgttcccagggagacggtggccgggctgccctggccccagtgctccaagcacttgtcgacgtctcctatcgtcgattcaacacagccgagtcctcatctctcagactgttcatttgcaagtacagcatgttcttgccattgtctctagagatggtgaatctacccttcagtgtctgcatagtataggctaccaccactagcactaatgtatgagacccattccagcccctttcttgaagcccggtgggcccagttcatgtcattgcttctcaagatgaatccgcaggctgcacatgagagtctcaggacacccccaaccccaccacagctgtaccaagtctcccccagactctaccagctgcacctcatactgcacaccgtctcctatcgtcgatctgagcgggctggcaaggc

SEQ ID NO: 2774 - DNA, 495 bp, Artificial Sequence
  source: /note="Description of Artificial Sequence: Synthetic polynucleotide"
gcctccctcgcgccatcaggtctcctacagtctgtccagccacacagacccccgggctgagacccaggcagggaggggtgacgttcccagggagacggtggccgggctgccctggccccagtgctccaagcacttgtcgacgtctcctacagtctgttcaagtaatacatggccgtgtccttagctttcagactgtccatttgcagatagagcatgctcttagaattgtctcggagattgtgaatcggcccttcacagagtctgcatagtatttctgacttccatcattccagatatgtgccactcactccagccccttccctggagcctggcggacccagctcatgccatagctactaaaggagaatcctgaggctgcacaggagagtctcagggaccccccaggctggaccaagcctcccccagactccaccagctgcacctcacactggacacctgcgtctcctacagtctgtctgagcgggctggcaaggc

SEQ ID NO: 2775 - DNA, 495 bp, Artificial Sequence
  source: /note="Description of Artificial Sequence: Synthetic polynucleotide"
gcctccctcgcgccatcaggtctcctaaacgcgtaccagccacacagacccccgggctgagacccaggcagggaggggtgacgttcccagggagacggtggccgggctgccctggccccagtgctccaagcacttgtcgacgtctcctaaacgcgtatcagtacagtaatagatggccgtgtactcggttttcagggtattcacttgcagatacagtgtgttctttgaatcatctcttgagatggtgaacctgcctttcacagatgcagcgcattctgtcgtgtaactgttacgtttggttctaatacggccaacccactccagccctttcccagaagcctggcggatccagtgcattcagaagtcactgaaggtgaatctagaagctgcaaatgagagtctcggggacccacccaggctgtaccaagcctcccccagactccaccagctgcgcctcacggtctcctaaacgcgtactgagcgggctggcaaggc

SEQ ID NO: 2776 - DNA, 495 bp, Artificial Sequence
  source: /note="Description of Artificial Sequence: Synthetic polynucleotide"
gcctccctcgcgccatcaggtctcctagtagttcgccagccacacagacccccgggctgagacccaggcagggaggggtgacgttcccagggagacggtggccgggctgccctggccccagtgctccaagcacttgtcgacgtctcctagtagttcgtcaacaataatacacagccatgtcctcagctatcaggctgttcatttgaagatacaaggacttcttggcgttgtctctggagatggtgaatcggcccatcacggagtctgcatagtatgtatcaccaccagtaccaatagctgatacccactccggacccttccctggagcccggcgaacccagtgcagaacatagctactgaaggcgaatccagaggctgcacaggagggtctcagggaccccccaggctgtaccaagcctcccccagactccaccagctgatcctcacactggacacctgcgtctcctagtagttcgctgagcgggctggcaaggc

SEQ ID NO: 2777 - DNA, 495 bp, Artificial Sequence
  source: /note="Description of Artificial Sequence: Synthetic polynucleotide"
gcctccctcgcgccatcaggtctcctacgaactacccagccacacagacccccgggctgagacccaggcagggaggggtgacgttcccagggagacggtggccgggctgccctggccccagtgctccaagcacttgtcgacgtctcctacgaactactcatgactcaataatacagagccatattctcagctctcagactgttcatttgcagatacaacctgtgcttggcattgtctttggagatggtgaatctgaccttcacagagtctgcatattatgtctgacttccatcgtacattatatctactactcactgcagcccctttcctggagcctggcagattcagctgatctagtagctacagaaggtggattcagaggatgcacggcagagtctcaggcacattcagcttgtgccaactctccccaagactccaccatctgcaccccacactagacgtctcctacgaactacctgagcgggctggcaaggc

SEQ ID NO: 2778 - DNA, 495 bp, Artificial Sequence
  source: /note="Description of Artificial Sequence: Synthetic polynucleotide"
gcctccctcgcgccatcaggtctcctattaacgtcccagccacacagacccccgggctgagacccaggcagggaggggtgacgttcccagggagacggtggccgggctgccctggccccagtgctccaagcacttgtcgacgtctcctattaacgtctcaacagtaatacacggtcatgtcctcagctctcaggctgttcacttgcagatagagggagttcttggcattgtctctggagatggtcaatcggcccttcacagagtctacatagtatttctcacttccgtcacactttatgtcggccacccactccagccccttctccggagcctggcagacccagtgcatccaggagctactgaaggtgaatccagaggctgcacaggagagtctcagggaccctccaggctgtaccaagcctcacccagactccaccagctgcacctcacactggacaccgtctcctattaacgtcctgagcgggctggcaaggc

SEQ ID NO: 2779 - DNA, 495 bp, Artificial Sequence
  source: /note="Description of Artificial Sequence: Synthetic polynucleotide"
gcctccctcgcgccatcaggtctcctaagcaacctccagccacacagacccccgggctgagacccaggcagggaggggtgacgttcccagggagacggtggccgggctgccctggccccagtgctccaagcacttgtcgacgtctcctaagcaaccttcacatacagtaatacacggccgtgccctctgctctcagactgttcatttgcaaacagagtgagttcttggcattttctttggagatggtgaatctgctcttcacagattgtgcataacatagctgacttctatcctactatatatctactactcactccagccccttccctggagcctgggaatctgagctcattcagtagctactgaaggttaatccagagtctgcacaggagagtctcagggatcccccaagttgtctttggttttcttcagactccaccagctgtacctcacactggacgtctcctaagcaacctctgagcgggctggcaaggc

SEQ ID NO: 2780 - DNA, 495 bp, Artificial Sequence
  source: /note="Description of Artificial Sequence: Synthetic polynucleotide"
gcctccctcgcgccatcaggtctcctattctcgagccagccacacagacccccgggctgagacccaggcagggaggggtgacgttcccagggagacggtggccgggctgccctggccccagtgctccaagcacttgtcgacgtctcctattctcgagtcaacagtaatacacagccttgtccttggctttcaggttggtcattgtaaggtagactgcacatgaaaaggtgtcgcttgggactgttaatttatttgtactcatggagagtaactctgagaactcccacttgatcactcactgtttccacccacaccaatccctgtcatgaagcctgctggaccaagctcatgctgtagccagtaaaggtgaaatcagaggctttgcaggagagtctcagtgaaccactgggctgtacaattttctgcctctgactccatcaataaacttcacacaggacttgtctcctattctcgagctgagcgggctggcaaggc

SEQ ID NO: 2781 - DNA, 495 bp, Artificial Sequence
  source: /note="Description of Artificial Sequence: Synthetic polynucleotide"
gcctccctcgcgccatcaggtctcctaactctacgccagccacacagacccccgggctgagacccaggcagggaggggtgacgttcccagggagacggtggccgggctgccctggccccagtgctccaagcacttgtcgacgtctcctaactctacgtcaacacagtaatacacagccatgtcgtcggctctcaggctgttcatttgcagatacagtgaattctgggcattgtctctagagatggtgaatcagcccttcacagagtctgtgtagagtacggtatcaccacttgtactaataactgagacccactccaaaccctttcctggagcctggtggacccagtgcatagcagagctactgaaggtgaatccagaggctgcacaggagagtctcagagaccctcccagtctttactaagcctcccccagactccaccagctgcacctcacactggacgtctcctaactctacgctgagcgggctggcaaggc

SEQ ID NO: 2782 - DNA, 495 bp, Artificial Sequence
  source: /note="Description of Artificial Sequence: Synthetic polynucleotide"
gcctccctcgcgccatcaggtctcctataccggaaccagccacacagacccccgggctgagacccaggcagggaggggtgacgttcccagggagacggtggccgggctgccctggccccagtgctccaagcacttgtcgacgtctcctataccggaatcaacagtagtacacaactgtgccctcggctctcaggctgttcatttgcagagacagtgaattctgggcattgtctctggagatggtgaatcggcccttcacagagtctgtgtagagtacggtatcaccacttgtactaataactgagacccactacaaaccctttcttggagcctggcggacccagtgcatagcagagctactgaaggtgaatccagaggctgcacaggagagtctcagggaccccccaggctggaccaagccttccccagactccaccagctgcacctcacactggacaccgtctcctataccggaactgagcgggctggcaaggc

SEQ ID NO: 2783 - DNA, 495 bp, Artificial Sequence
  source: /note="Description of Artificial Sequence: Synthetic polynucleotide"
gcctccctcgcgccatcaggtctcctacgaattgcccagccacacagacccccgggctgagacccaggcagggaggggtgacgttcccagggagacggtggccgggctgccctggccccagtgctccaagcacttgtcgacgtctcctacgaattgctcatgtacagccatgcatggtcatgtcctcagctctcagactgttcgtttggagatacggtgagttcttagcattgtctttggagatggtgaatctgcccttcacagagtctgcatggtatatctgacttccatcatattttacatctattactccctccagccccttccctagagtctcattgacccagctcattcagtagctactgaaggtgaatccagaggctacacaggagagtctcaggaacttcccaagttgtctcaggccctctatggactctatcagctccacctcacactgaacgtctcctacgaattgcctgagcgggctggcaaggc

SEQ ID NO: 2784 - DNA, 495 bp, Artificial Sequence
  source: /note="Description of Artificial Sequence: Synthetic polynucleotide"
gcctccctcgcgccatcaggtctcctattcgctcaccagccacacagacccccgggctgagacccaggcagggaggggtgacgttcccagggagacggtggccgggctgccctggccccagtgctccaagcacttgtcgacgtctcctattcgctcatcagtatagtaatacacggccgtgtcctcggttttcaggctgttcatttgcagataggcgatgcttttggaatcatcgcttgagatggtgaatctgcctttcacagacgcggcgtattctgttgttccacgattagttttgtttttagtgaaacctacccactccagcccctttcctggagcccggcagatccactgcatgcagtagttaacggaaggtgaatccagaggctgcacaggagagtctcagggaccccccaggctgtaccaagcctcccccagactccaccagctgcacctcacagtctcctattcgctcactgagcgggctggcaaggc

SEQ ID NO: 2785 - DNA, 495 bp, Artificial Sequence
  source: /note="Description of Artificial Sequence: Synthetic polynucleotide"
gcctccctcgcgccatcaggtctcctagacgttaaccagccacacagacccccgggctgagacccaggcagggaggggtgacgttcccagggagacggtggccgggctgccctggccccagtgctccaagcacttgtcgacgtctcctagacgttaatcaacagtaatacacggccgtgtcctcggctctcaggctgttcatttgcagataggtgatgcttttggaatcatctcttgagattgtgaatctgcctttcacagacgtggtctattctgttgtcccaccattagctttgtttctaatgaaacctacccactccagccccttcccgggagcctggcggacccagctcatgtagtagtcactgaaggtgaatccagaggctgcacaggagagtctcagggaccccccaggctggaccaagcctcccccggactccaccagctgcacctcacactggtctcctagacgttaactgagcgggctggcaaggc

SEQ ID NO: 2786 - DNA, 495 bp, Artificial Sequence
  source: /note="Description of Artificial Sequence: Synthetic polynucleotide"
gcctccctcgcgccatcaggtctcctacgtagagtccagccacacagacccccgggctgagacccaggcagggaggggtgacgttcccagggagacggtggccgggctgccctggccccagtgctccaagcacttgtcgacgtctcctacgtagagttcacacagtaatacgtggctgtgtactcagctctcaaactgttcatttccagataagagtgtgttcttggcattgtttctggagatggggaatcagaacttcccagaatgtgcatagcgtatgctactcccatcagtactaatacatgagacccactccagtctgttccctggagcctggcaggcccagtgcatccagtggctactgaaggcaaatccagaggctgcacaggacagtctcagggacccccacccccaccgcgccaggctgtaccaagtctcccccaggctccaacaactgcgcgtctcctacgtagagtctgagcgggctggcaaggc

SEQ ID NO: 2787 - DNA, 495 bp, Artificial Sequence
  source: /note="Description of Artificial Sequence: Synthetic polynucleotide"
gcctccctcgcgccatcaggtctcctattccggtaccagccacacagacccccgggctgagacccaggcagggaggggtgacgttcccagggagacggtggccgggctgccctggccccagtgctccaagcacttgtcgacgtctcctattccggtatcacagtaatagacggccatggtgtcagcaatgaaactgtttatttgcagatacagtgagttcttggtgttttctctggagatggtcaaccggcccttcacagagtctgagtagtatatgcctccaccactagcattaatgtaagacccactccagtcccttccctggagcttggtccacctagtgcatgccatagttactgaaagtgtatccagaggctgcacaggagagtcacatggaccccccaagctgtaccaagcctcccccagactctaccagctacacttcacattggacacctgcgtctcctattccggtactgagcgggctggcaaggc

SEQ ID NO: 2788 - DNA, 495 bp, Artificial Sequence
  source: /note="Description of Artificial Sequence: Synthetic polynucleotide"
gcctccctcgcgccatcaggtctcctagcaattcgccagccacacagacccccgggctgagacccaggcagggaggggtgacgttcccagggagacggtggccgggctgccctggccccagtgctccaagcacttgtcgacgtctcctagcaattcgtcacatacagtaacacacagctgtgccctctgctctcagactgttcatttgcaaatacagtgagttcttggcattttctttggagacggtgaatctgctcgtcacagattgtgcataacatatctgacttccatcacactgtatatctactactcactccagccccttccctggagcctgggaaaccgagctcattcagtagctactgaaggttaatccagaggctgcacaggagagtctcagggaacccaggttgtcttgggtcctctccagactccaccagctgtacctcacactggacacgtctcctagcaattcgctgagcgggctggcaaggc

SEQ ID NO: 2789 - DNA, 495 bp, Artificial Sequence
  source: /note="Description of Artificial Sequence: Synthetic polynucleotide"
gcctccctcgcgccatcaggtctcctatgagcgaaccagccacacagacccccgggctgagacccaggcagggaggggtgacgttcccagggagacggtggccgggctgccctggccccagtgctccaagcacttgtcgacgtctcctatgagcgaatcaacagtaatacacagccgtgtcctcggctctcaggctgttcatttgcagatacagtgagttcttggcgttgtctctggagatggtgaatcggcccttcacagagtctgcgtagtatatggtactactactactaatggatgagacccactccagccccttccctggagcctggcggacccagttcatgtagtagtcactgaaggtgaatccagaggctgcacaggagagtctcagggaccccccaggctttaccaagcctcccccagactccaccagctgcacctcacactggacacctgcgtctcctatgagcgaactgagcgggctggcaaggc

SEQ ID NO: 2790 - DNA, 495 bp, Artificial Sequence
  source: /note="Description of Artificial Sequence: Synthetic polynucleotide"
gcctccctcgcgccatcaggtctcctatactaagcccagccacacagacccccgggctgagacccaggcagggaggggtgacgttcccagggagacggtggccgggctgccctggccccagtgctccaagcacttgtcgacgtctcctatactaagctcaacagtaatacacggccgtgtccgcggcggtcacagagctcagcttcaggtagaactggttcttggacgtgtctacggacatggtgattcgactcttgagggacgggttgtagtaggtgctcccactatgatggatttccccaatccactccagccccttccctgggggctggcggacccagattcaccagttaccactgctgatggagtcaccagagacagcgcagatgagggacagggtctccgaaggcttcaccagtcctgggcccgactcctgcagctgcacctgggacaggaccccgtctcctatactaagcctgagcgggctggcaaggc

SEQ ID NO: 2791 - DNA, 495 bp, Artificial Sequence
  source: /note="Description of Artificial Sequence: Synthetic polynucleotide"
gcctccctcgcgccatcaggtctcctatggcgtatccagccacacagacccccgggctgagacccaggcagggaggggtgacgttcccagggagacggtggccgggctgccctggccccagtgctccaagcacttgtcgacgtctcctatggcgtattcactgcgcccgccccctccgcctccctgcggtcacagagctcagcttcagggaaaactggttcttggacgtttctattgacatggtgactcaactcctgagggacggggtgtagtagctcctcccactataatagatgtatccaatccattccagccccttccctggggactggcggaccagctccaccagttaccactgctgatggagtcaccagagacagcgcatgtgagggacagggtctccgaagcttcaccagtcctgggccccactcctgcagctgcactgggacaggacccctgtgtctcctatggcgtatctgagcgggctggcaaggc

SEQ ID NO: 2792 - DNA, 495 bp, Artificial Sequence
  source: /note="Description of Artificial Sequence: Synthetic polynucleotide"
gcctccctcgcgccatcaggtctcctagataaccaccagccacacagacccccgggctgagacccaggcagggaggggtgacgttcccagggagacggtggccgggctgccctggccccagtgctccaagcacttgtcgacgtctcctagataaccatcattagatggtccctctcacacaataatacatggcggcgtccgaggccttcaggctgctccactgcaggtaggcggtgctgctggagctgtcggctgagatggtgacgtggccttggaaggatgggctgtatctggtatcagagttcccaggatagatgctccccatccactccagttctttcccgggcatctggcgcacccagtggatccagtagctggtaaagctgtatccagaagtcttacaggagatcctcagagactccccgggtcttttcacctctgctgcagactgcaacagctggtctcctagataaccactgagcgggctggcaaggc

SEQ ID NO: 2793 - DNA, 495 bp, Artificial Sequence
  source: /note="Description of Artificial Sequence: Synthetic polynucleotide"
gcctccctcgcgccatcaggtctcctactagtgaaccagccacacagacccccgggctgagacccaggcagggaggggtgacgttcccagggagacggtggccgggctgccctggccccagtgctccaagcacttgtcgacgtctcctactagtgaatcagcacgtgtcctcagcctttaggctgctgatatgaagatatgccatgctgacggaggtgtccatggagaagacaaaccgtcctgtgaagccctgggcatacgttaggttcccagtgttggtgttgatccatcccatttcctcaagcccttgtccatgggcctgtcatacccagctgatagcatagcttgtgaaggtgtatccagaagccttgcaggaaaccttcaatgaggctccaggcttcttcacctcaggcccagactgcaccagctgcacctgtgagtggacacctgtggagaggaggtctcctactagtgaactgagcgggctggcaaggc

SEQ ID NO: 2794 - DNA, 495 bp, Artificial Sequence
  source: /note="Description of Artificial Sequence: Synthetic polynucleotide"
gcctccctcgcgccatcaggtctcctaacgttcacccagccacacagacccccgggctgagacccaggcagggaggggtgacgttcccagggagacggtggccgggctgccctggccccagtgctccaagcacttgtcgacgtctcctaacgttcactcaacagtaatactcggccgtgtcctcagcctttaggctgctgatctgaagacacgccgtgctgacagacgtgtccatggagaagacaaaccatcctgtgaagccgtgggtatacgttgggttcccagtgtaggtgatgatccatcacatccactcaaagccctgtccaggggtctatcatacccaattcataccatagatggtgaaggtgtaaccagaagacttataggagaccttcactgaggccccaggcttcttcacctcaggcccagactgcaccagctgcagggagtgggcacctgtgtctcctaacgttcacctgagcgggctggcaaggc

SEQ ID NO: 2795 - DNA, 448 bp, Artificial Sequence
  source: /note="Description of Artificial Sequence: Synthetic polynucleotide"
gcctccctcgcgccatcaggtctcctaattacgctccagccacacagacccccgggctgagacccaggcagggaggggtgacgttcccagggagacggtggccgggctgccctggccccagtgctccaagcacttgtcgacgtctcctaattacgcttcatctctcatacagtcatacacggccgtgtcctcagcctttaggctgctgatcttcagatacgccatgctgacagaggtgtccatggagaatagaaaccgtcctgtgaagccgttggtatatgttgggttcccagtgtaggtgatgatccatcccatccactcaagcccttgtccaggggctggtcacactgaattcataccatactggctgcatagtattccatgatttacatatatcatattttatctaatcagtctcctaattacgctctgagcgggctggcaaggc

SEQ ID NO: 2796 - DNA, 495 bp, Artificial Sequence
  source: /note="Description of Artificial Sequence: Synthetic polynucleotide"
gcctccctcgcgccatcaggtctcctacattgagtccagccacacagacccccgggctgagacccaggcagggaggggtgacgttcccagggagacggtggccgggctgccctggccccagtgctccaagcacttgtcgacgtctcctacattgagttcaacacagtaataaatggctgcatcctcagtctttaggcagctagtctgcagatccgccgtgctgacagaggtgtccatggagaagacaaaccgtgtgtgaatctgtgggcatacattgggttcaccagggtaggatgatccatcccatccactcaagcccctgtcctggggtctgtcgtatccaattcataccataggtgatgacagtttaaccagacaccttgcaggagaccttcgccgaggccccaggctgcttcacctcaggcccagactgcaccagctgcactcgggagtgggcaccgtctcctacattgagtctgagcgggctggcaaggc

SEQ ID NO: 2797 - DNA, 495 bp, Artificial Sequence
  source: /note="Description of Artificial Sequence: Synthetic polynucleotide"
gcctccctcgcgccatcaggtagacaccttggttacctgcccttctcatggaaccctctgctggcctcccacgtaccccacattctggcctgacccctcagaagccagaccactgtcggcctgggaagtccaactgtcgacgtagacaccttggttatcaacagtaatacacggccgtgtcgtcagatctcagcctgctcagctccatgtaggctgtgctgatggacgtgtccctggtcatggtgaccctgccctgaaacttctgtgcatagtttgtgccaccactgttagggttgatccatcccatccactcaagcccttgtccaggggcctgtcgcacccagtgcatatagtagccggtgaaggtgtatccagaagccttgcaggagaccttcactgaggccccaggcttcttcacctcagccccagactgcaccagctgcacctgggagtgggctccgtagacaccttggttactgagcgggctggcaaggc

SEQ ID NO: 2798 - DNA, 495 bp, Artificial Sequence
  source: /note="Description of Artificial Sequence: Synthetic polynucleotide"
gcctccctcgcgccatcaggtagacacacctcttgcctgcccttctcatggaaccctctgctggcctcccacgtaccccacattctggcctgacccctcagaagccagaccactgtcggcctgggaagtccaactgtcgacgtagacacacctcttgtcaacagtaatacacagccatgtcctcagatctcaggctgctcagctccatgtaggctgtgctcgcggatgtgtccctggtaatggtgactctgccctggaactcctgtgaatattttgtgttaccattgccagcgttgctccatcccatccactcaagcctttgtccgggggcctggcgcacccaatgcatagcatagctagtgaaggtgtatccagaagccttgcaggaaaccttcactgaggccccaggcttcttcacctcagccccagactgcaccagctgaacctgggagtggacaccgtagacacacctcttgctgagcgggctggcaaggc

SEQ ID NO: 2799 - DNA, 495 bp, Artificial Sequence
  source: /note="Description of Artificial Sequence: Synthetic polynucleotide"
gcctccctcgcgccatcaggtagacacctgattctcctgcccttctcatggaaccctctgctggcctcccacgtaccccacattctggcctgacccctcagaagccagaccactgtcggcctgggaagtccaactgtcgacgtagacacctgattcttcaacagtaatacacggccgtgtcctcagatctcaggctgctcagctccatgtaggctgtgcttatggaggtgttcctggtcatggtgactctgccctggaacttctgtgcatagcctgtgttaccactgttagggttcatccatcccatccactcaagcccttgtccagtggcctgtcgcacccagttgatatcataactggtgaaggtgtatccagaagccttgcaggagaccttcactgaggccccaggcttcttcacctcagccccagactgcaccagctgcacctgggagtgggcaccgtagacacctgattctctgagcgggctggcaaggc

SEQ ID NO: 2800 - DNA, 495 bp, Artificial Sequence
  source: /note="Description of Artificial Sequence: Synthetic polynucleotide"
gcctccctcgcgccatcaggtagacacagtaccgacctgcccttctcatggaaccctctgctggcctcccacgtaccccacattctggcctgacccctcagaagccagaccactgtcggcctgggaagtccaactgtcgacgtagacacagtaccgatcaacagtaatacacggccgtgtcgtcagatctcaggctcctcagctccatgtaggctgtgctcgtggatgtgtctgtggtcatggtgactctgccctggagcttctgtgcatagtttgtgttaccattgtaagcgctgatccatcccatccactcaagcccttgtccaggggcctgtcgcacccagctgataccatagctggtaaaggtgtaaccagaagccttgcaggagaccttcactgaggccccaggcttcttcacctcagctccagactgcaccagctgaacctgggagtgggcaccgtagacacagtaccgactgagcgggctggcaaggc

SEQ ID NO: 2801 - DNA, 495 bp, Artificial Sequence
  source: /note="Description of Artificial Sequence: Synthetic polynucleotide"
gcctccctcgcgccatcaggtagacacatccatggcctgcccttctcatggaaccctctgctggcctcccacgtaccccacattctggcctgacccctcagaagccagaccactgtcggcctgggaagtccaactgtcgacgtagacacatccatggtcaacagtaatacacggccgtgtcctcagatctcaggctgctcagctccatgtaggctgtgtctgtagatgtgtcctcggtcatggtgactctgccctggaacttctgtgcgtagattgtttcaccatcttcaggatcaaaacctcccatccactcaagcccttttccaggagcctgtcgcacccagtgcatggataattcagtgagggtgtatccggaaaccttgcaggagaccttcactgaggccccaggcttcttcacctcagccccagactgtaccagctggacctgggcgtgggtgccgtagacacatccatggctgagcgggctggcaaggc

SEQ ID NO: 2802 - DNA, 495 bp, Artificial Sequence
  source: /note="Description of Artificial Sequence: Synthetic polynucleotide"
gcctccctcgcgccatcaggtagacacgtagcagtcctgcccttctcatggaaccctctgctggcctcccacgtaccccacattctggcctgacccctcagaagccagaccactgtcggcctgggaagtccaactgtcgacgtagacacgtagcagttcaacagtaatacatggctgtgtcctcagatctcaggctgctcagctccatgtaggctgtgctcatagacctgtccctggtaatggtgactctgtcctggaatttctgtgcgtagttggtgttaccattgaaaggtgtgatccatcccatccactcaagcgcttgtccgggggcctgtcgcacccagtgcaggtagcggtaggtgaaggtgtatccggaagccttgcaggaaaccttcactgaggacccagtcttcttcacctcagccccagactgcaccagctgcatctgggagtaggcatcgtagacacgtagcagtctgagcgggctggcaaggc

SEQ ID NO: 2803 - DNA, 495 bp, Artificial Sequence
  source: /note="Description of Artificial Sequence: Synthetic polynucleotide"
gcctccctcgcgccatcaggtagacacatcttcgtcctgcccttctcatggaaccctctgctggcctcccacgtaccccacattctggcctgacccctcagaagccagaccactgtcggcctgggaagtccaactgtcgacgtagacacatcttcgttcaacagtaatacacggccgtgtcctcagatctcaggctgctcagctccatgtagactgtgctcgtggacgtgtccctggtcatggtgactctgccctggaacttctgtgcgtagcttgtgctaccaccactagggttgattattcccatccactcaagcccttgtccaggggcctgtcgcacccagtgcatatagtagctggtgaaggtgtatccagatgccttgcaggaaaccttcactgaggccccaggcttcttcacctcagccccagactgcaccagctgcacctgggagtgagcaccgtagacacatcttcgtctgagcgggctggcaaggc

SEQ ID NO: 2804 - DNA, 495 bp, Artificial Sequence
  source: /note="Description of Artificial Sequence: Synthetic polynucleotide"
gcctccctcgcgccatcaggtagacactccacagtcctgcccttctcatggaaccctctgctggcctcccacgtaccccacattctggcctgacccctcagaagccagaccactgtcggcctgggaagtccaactgtcgacgtagacactccacagttcaacagtaatacacggccgtgtcctcggatctcaggctgctcagctccatgtaggctgtgcttgtggacatgtccctggtaatggtgactctttcctggaacttctgtgcgtagtttgtgttaccactgccaacgacgatccatcctatccactcaaggcgttgtccacgagcctgtcgcacccactgcatagcagagctagtaaaggtgaatccagaagccttgcaggagaccttcactgaggtcccaggcttcttcacctcaggcccagactgcaccagctgcatttgggagtgggcaccgtagacactccacagtctgagcgggctggcaaggc

SEQ ID NO: 2805 - DNA, 495 bp, Artificial Sequence
  source: /note="Description of Artificial Sequence: Synthetic polynucleotide"
gcctccctcgcgccatcaggtagacacagctagtgcctgcccttctcatggaaccctctgctggcctcccacgtaccccacattctggcctgacccctcagaagccagaccactgtcggcctgggaagtccaactgtcgacgtagacacagctagtgtcaacagtaatacacggccgtgtcctcagatctcaggctgctcagctccatgtaggctgtgctcgtggatttgtccgcggtaatcgtgactctgccctggaacttctgtgcgtagtttgctgtaccaaagatagggatgatccctcccatccactcaagcccttgtccaggggcctgtcgcacccagctgatagcatagctgctgaaggtgcctccagaagccttgcaggagaccttcaccgaggacccaggcttcttcacctcagccccagactgcaccagctgcacctgggactggacaccgtagacacagctagtgctgagcgggctggcaaggc

SEQ ID NO: 2806 - DNA, 495 bp, Artificial Sequence
  source: /note="Description of Artificial Sequence: Synthetic polynucleotide"
gcctccctcgcgccatcaggtagacactaaccaagcctgcccttctcatggaaccctctgctggcctcccacgtaccccacattctggcctgacccctcagaagccagaccactgtcggcctgggaagtccaactgtcgacgtagacactaaccaagtcaatagtaatacacagccatgtcctcagatgtcaggctgctcaggtctgtgtaggctgtggttgtggacatgtccctggtcatggtgaatctgccctgaaacttcttggcatagcttgggctaccattgccagggttgatccatcccatccactcaagcccttgtccaggggactgttgcacccaatgtataccgtagctggtgatggtaaacccagaaaaactacaggagactttcactgaggccccagacttcctcacctcagcccaagactgcaccagctggacctgggagtgggcaccgtagacactaaccaagctgagcgggctggcaaggc

SEQ ID NO: 2807 - DNA, 495 bp, Artificial Sequence
  source: /note="Description of Artificial Sequence: Synthetic polynucleotide"
gcctccctcgcgccatcaggtagacaccaagaggtcctgcccttctcatggaaccctctgctggcctcccacgtaccccacattctggcctgacccctcagaagccagaccactgtcggcctgggaagtccaactgtcgacgtagacaccaagaggttcaacagtaatacacggccgtgtcctcagatctcaggctgctcagctccatgtaggctgtgtctgtagacgtgtccgcggttatggtgactctgccctggaacttctctgcgtatattgtttcaccatcttcaggatcaacaagtcccatccactcaagcccttttccaggggcctgttgcacccagtgcatgtagtagtcggtgaaggtgtatccagaaaccttgcaggagattttcactgtagccccaggcttcttcacctcagccccagactgtaccagctggacctcggcgtgggtgccgtagacaccaagaggtctgagcgggctggcaaggc

SEQ ID NO: 2808 - DNA, 495 bp, Artificial Sequence
  source: /note="Description of Artificial Sequence: Synthetic polynucleotide"
gcctccctcgcgccatcaggtagacacagttgacccctgcccttctcatggaaccctctgctggcctcccacgtaccccacattctggcctgacccctcagaagccagaccactgtcggcctgggaagtccaactgtcgacgtagacacagttgacctcatgcacagtaatatgtggctgtgtccacagggtccatgttggtcattgtaaggaccacctggtttttggaggtgtccttggtgatggtgagcctgctcttcagagatgggctgtagcgcttatcatcattccaataaatgagtgcaagccactccagggcctttcctgggggctgacggatccagcccacacccactccactagtgctgagtgagaacccagagaaggtgcaggtcagcgtgagggtctgtgtgggtttcaccagcgtaggaccagactccttcaaggtgatctgggacaagtagacacagttgaccctgagcgggctggcaaggc

SEQ ID NO: 2809 - DNA, 495 bp, Artificial Sequence
  source: /note="Description of Artificial Sequence: Synthetic polynucleotide"
gcctccctcgcgccatcaggtagacaccagcatatcctgcccttctcatggaaccctctgctggcctcccacgtaccccacattctggcctgacccctcagaagccagaccactgtcggcctgggaagtccaactgtcgacgtagacaccagcatattcatgcacagtaatatgtggctgtgtccacagggtccatgttggtcatggtaaggaccacctggcttttggaggtgtccttggagatggtgagcctgctcttcagagatgtgctgtaggatttttcgtcattcgaaaaaatgtgtgcaagccactccagggccttccctgggggctgacggatccagctcacacccattctagcattgctgagtgagaacccagagacggtgcaggtcagcgtgagggtctctgtgggtttcaccagcacaggaccagactccttcaaggtgacctgggacaagtagacaccagcatatctgagcgggctggcaaggc

SEQ ID NO: 2810 - DNA, 495 bp, Artificial Sequence
  source: /note="Description of Artificial Sequence: Synthetic polynucleotide"
gcctccctcgcgccatcaggtagacacgcaggattcctgcccttctcatggaaccctctgctggcctcccacgtaccccacattctggcctgacccctcagaagccagaccactgtcggcctgggaagtccaactgtcgacgtagacacgcaggatttcatgcacaataatacgtggctgtgtccacagggtccatgttggtcattgtaaggaccacctggtttttggaggtgtccttggagatggtgagcctggtcttcagagatgtgctgtagtatttatcatcatcccaatcaatgagtgcaagccactccagggccttccctgggggctgacggatccagctcacacacattccactagtgctgagtgagaacccagagaaggtgcaggtcagtgtgagggtctgtgtgggtttcaccagcgcaggaccagactccctcaaggtgacctgggataagtagacacgcaggattctgagcgggctggcaaggc

SEQ ID NO: 2811 - DNA, 495 bp, Artificial Sequence
  source: /note="Description of Artificial Sequence: Synthetic polynucleotide"
gcctccctcgcgccatcaggtagacacgtccattccctgcccttctcatggaaccctctgctggcctcccacgtaccccacattctggcctgacccctcagaagccagaccactgtcggcctgggaagtccaactgtcgacgtagacacgtccattctcaacagtaatacacagccgtgtcctcggctctcaggctgttcatttgcagatacagtgagttcttggcgttgtctctggagatggtgaatcggcccttcacagagtccacatagtatttctcacttccatcttgctttatgttggccacccactccagccccttccctggagcctggcggacccagctcatccaatagctactaaaggtgaatccagaggctgcacaggagagtctcagggaccccccaggctggaccaagcctcccccagactccaccagctgcacctcacactggacaccgtagacacgtccattcctgagcgggctggcaaggc

SEQ ID NO: 2812 - DNA, 495 bp, Artificial Sequence
  source: /note="Description of Artificial Sequence: Synthetic polynucleotide"
gcctccctcgcgccatcaggtagacacgcataactcctgcccttctcatggaaccctctgctggcctcccacgtaccccacattctggcctgacccctcagaagccagaccactgtcggcctgggaagtccaactgtcgacgtagacacgcataacttcatgcacagtaatacaaggccgtgtcctcagctctcagactgttcatttgcagatacagggagttcttggcgttgtctctggagatggtgaatcggcccttcacagagtccgcatagcctatgctaccactattccaactaatacctgagacccactccaggcccttccctggagcttgccggacccagtgcatggcataatcatcaaaggtgaatccagaggctgcacaggagagtctcagggacctgccaggctgtaccaagcctcccccagactccaccagctgcacttcacactggacgtagacacgcataactctgagcgggctggcaaggc

SEQ ID NO: 2813 - DNA, 495 bp, Artificial Sequence
  source: /note="Description of Artificial Sequence: Synthetic polynucleotide"
gcctccctcgcgccatcaggtagacacatatgctgcctgcccttctcatggaaccctctgctggcctcccacgtaccccacattctggcctgacccctcagaagccagaccactgtcggcctgggaagtccaactgtcgacgtagacacatatgctgtcaacagtaatacacggccgtgtcctcggctctcaggctgttcatttgcagatacagtgagttcttggcgttgtccctggagatggtgaatcggcccttcacagagtctgcgtagtatatggtactaccactactactaatgtatgaaacccactccagccccttccctggagcctggcggatccagctcatgtagtagtcactgaaggtgaatccagaggctgcacaggagagtctcagggaccctccaggcttgaccaagcctcccccagactccaccagctgcacctgacactggacaccgtagacacatatgctgctgagcgggctggcaaggc

SEQ ID NO: 2814 - DNA, 495 bp, Artificial Sequence
  source: /note="Description of Artificial Sequence: Synthetic polynucleotide"
gcctccctcgcgccatcaggtagacacaatcctgccctgcccttctcatggaaccctctgctggcctcccacgtaccccacattctggcctgacccctcagaagccagaccactgtcggcctgggaagtccaactgtcgacgtagacacaatcctgctcaacagtaatacacagccgtgtccccggctctcaggctgttcatttgaagatacaaggagttcttggcattttctctggagatggtgaatcggcccttcacggagcctggatagtatgtgtcaccagcagtaccaatagctgagacccactccagaccttttcctgtagcttggcggacccagtgcatgtcgtagctactgaaggtgaatccagaggctgcacaggagagtctcagggaccccccaggctgtaccaagcctcccccagactccaccagctgcacctcacactggacacctgcgtagacacaatcctgcctgagcgggctggcaaggc

SEQ ID NO: 2815 - DNA, 495 bp, Artificial Sequence
  source: /note="Description of Artificial Sequence: Synthetic polynucleotide"
gcctccctcgcgccatcaggtagacactgagacctcctgcccttctcatggaaccctctgctggcctcccacgtaccccacattctggcctgacccctcagaagccagaccactgtcggcctgggaagtccaactgtcgacgtagacactgagaccttcaacagtaatacacggctgtgtcctcggttttcaggctgttcatttgcagatacagcgtgttttttgaatcatctcttgagatggtgaatctgcctttcacgggtgcagcgtagtctgttgtcccaccatcagttttgcttttaatacggccaacccactccagccccttccctggagcctggcggacccagctcatccaggcgttactgaaagtgaatccagaggctgcacaggagagtctaagggaccccccaggctttaccaagcctcccccagactccaccagctgcacctcacactggtagacactgagacctctgagcgggctggcaaggc

SEQ ID NO: 2816 - DNA, 495 bp, Artificial Sequence
  source: /note="Description of Artificial Sequence: Synthetic polynucleotide"
gcctccctcgcgccatcaggtagacacgaatggaccctgcccttctcatggaaccctctgctggcctcccacgtaccccacattctggcctgacccctcagaagccagaccactgtcggcctgggaagtccaactgtcgacgtagacacgaatggactcaacagtaatacacagccatgtcctcggctctccgtctgttcttttgcagatacagggagttcctggaattgtctctggagatgatgaatcggcgcttcacggagtccacatagtgcgtcctactgccattccaactaacacccgatacccactccagcccctttcctggagccttgcgggcccagttcatgtcactgttactgaaggtgaatccagaggctgcacaggagagtctcagggaccccccaggctgtaccaagcctcccccagactccaccagctgcacctcacactggacaccgtagacacgaatggacctgagcgggctggcaaggc

SEQ ID NO: 2817 - DNA, 495 bp, Artificial Sequence
  source: /note="Description of Artificial Sequence: Synthetic polynucleotide"
gcctccctcgcgccatcaggtagacaccacatggacctgcccttctcatggaaccctctgctggcctcccacgtaccccacattctggcctgacccctcagaagccagaccactgtcggcctgggaagtccaactgtcgacgtagacaccacatggatcaacagtgatacaaggccgtgtcctcggctctcagactgttcatttgcagatacagggagttcttggcgttgtctctggagatggtgaatcggcccttcacagagtctgcataacctgtgctaccaccattccaattaataccagagacccactccagccccttccctggagcttggcggacccagctcatgccataatcatcaaaggtgaatccagaggctgcacaggagagtctcagggaccccccaggccgtaccacacctcccccagactccaccagctgcacctcacactggacaccgtagacaccacatggactgagcgggctggcaaggc

SEQ ID NO: 2818 - DNA, 495 bp, Artificial Sequence
  source: /note="Description of Artificial Sequence: Synthetic polynucleotide"
gcctccctcgcgccatcaggtagacacttgaccatcctgcccttctcatggaaccctctgctggcctcccacgtaccccacattctggcctgacccctcagaagccagaccactgtcggcctgggaagtccaactgtcgacgtagacacttgaccattcaacagtaatacacagccgtgtcctcggctctcaggctgttcatttgcagatacagtgagttcttggcgttgtctctggagatggtgaatcggcccttcactgagtctgcgtagtatatgtaactactactactactaatggatgagacccactccagccccttccctggagcctggcggacccagttcatgctatagctactgaaggtgaatccagaggctgcacaggagagtctcagggaccccccaggcttgaccaggcctcccccagactccaccagctgcacctcacactggacaccgtagacacttgaccatctgagcgggctggcaaggc

SEQ ID NO: 2819 - DNA, 495 bp, Artificial Sequence
  source: /note="Description of Artificial Sequence: Synthetic polynucleotide"
gcctccctcgcgccatcaggtagacacaagccatccctgcccttctcatggaaccctctgctggcctcccacgtaccccacattctggcctgacccctcagaagccagaccactgtcggcctgggaagtccaactgtcgacgtagacacaagccatctcaacagtaatatacggccgtgtcctcggctctcaggctgttcatttgcagatacagcgtgttcttggaattgtctctggagatggtgaaccggcccttcacggagtctgcgtagtatgtgctaccaccactaccactaatagctgagacccactccagccccttccctggagcctggcggacccagctcatggcatagctgctaaaggtgaatccagaggctgcacaggagagtctcagggaccccccaggctgtaccaagcctcccccagactccaacagctgcacctcacactggacaccgtagacacaagccatcctgagcgggctggcaaggc

SEQ ID NO: 2820 - DNA, 495 bp, Artificial Sequence
  source: /note="Description of Artificial Sequence: Synthetic polynucleotide"
gcctccctcgcgccatcaggtagacactccatgtgcctgcccttctcatggaaccctctgctggcctcccacgtaccccacattctggcctgacccctcagaagccagaccactgtcggcctgggaagtccaactgtcgacgtagacactccatgtgtcaacagtaatacacagccgtgtcctcagctctcaggctgttcatttgcagatacagcgtgttcttggaattgtctctggagatggtgaatcggcccttcacggagtctgcatagtatttattacttccatcatatgatataactgccacccactccagccccttgcctggagcctggcggacccagtgcatgccatagctactgaaggtgaatccagaggctgcacaggagagtctcagggacctcccaggctggaccacgcctcccccagactccaccagctgcacctgacactggacaccgtagacactccatgtgctgagcgggctggcaaggc

SEQ ID NO: 2821 - DNA, 495 bp, Artificial Sequence
  source: /note="Description of Artificial Sequence: Synthetic polynucleotide"
gcctccctcgcgccatcaggtagacaccaagtcaccctgcccttctcatggaaccctctgctggcctcccacgtaccccacattctggcctgacccctcagaagccagaccactgtcggcctgggaagtccaactgtcgacgtagacaccaagtcactcaacagtaatacacagccgtgtcctcagctctcaggctgttcatttgcagatacagcgtgttcttggaattgtctctggagatggtgaatcggcccttcacggagtctgcatagtatttattacttccatcatatgatataactgccacccactccagccccttgcctggagcctggcggacccagtgcatgccatagctactgaaggtgaatccagaggctgcacaggagagtctcagggacctcccaggctggaccacgcctcccccagactccaccagctgcacctgacactggacaccgtagacaccaagtcacctgagcgggctggcaaggc

SEQ ID NO: 2822 - DNA, 495 bp, Artificial Sequence
  source: /note="Description of Artificial Sequence: Synthetic polynucleotide"
gcctccctcgcgccatcaggtagacacctgcaatccctgcccttctcatggaaccctctgctggcctcccacgtaccccacattctggcctgacccctcagaagccagaccactgtcggcctgggaagtccaactgtcgacgtagacacctgcaatctcaacagtaatacacagccgtgtcctcggctctcaggctgttcatttgcagatacagcgtgttcttggaattgtctctggagatggtgaatcggcccttcacggagtctgcatagtatttattacttccatcataccatataactgccacccactccagccccttgcctggagcctggcggacccagtgcatgccatagctactgaaggtgaatccagacgctgcacaggagagtctcagggacctcccaggctggaccacgcctcccccagactccaccagctgcacctgacactggacaccgtagacacctgcaatcctgagcgggctggcaaggc

SEQ ID NO: 2823 - DNA, 495 bp, Artificial Sequence
  source: /note="Description of Artificial Sequence: Synthetic polynucleotide"
gcctccctcgcgccatcaggtagacacatcgacgacctgcccttctcatggaaccctctgctggcctcccacgtaccccacattctggcctgacccctcagaagccagaccactgtcggcctgggaagtccaactgtcgacgtagacacatcgacgatcaacagtaatacacagccgtgtcctcggccctcaggctattcgtttgcagatacagggtgttcctggaattgtctctggagatgatgaatcggcccttcacagagtctgcatagtgcgtcctactgccattccaactaacacccgatacccactccagcccctttcctggagcctgatggacccagttcatgtcactgttactgaaggtgaatccagaggctgcacaggagagtctcagggatcccccaggctgtaccaagcctcccccagactccaccagctgcacctcacactggacaccgtagacacatcgacgactgagcgggctggcaaggc

SEQ ID NO: 2824 - DNA, 495 bp, Artificial Sequence
  source: /note="Description of Artificial Sequence: Synthetic polynucleotide"
gcctccctcgcgccatcaggtagacacacagactgcctgcccttctcatggaaccctctgctggcctcccacgtaccccacattctggcctgacccctcagaagccagaccactgtcggcctgggaagtccaactgtcgacgtagacacacagactgtcaacagtaatacacggccgtgccctcagctctcaggttgttcatttgaagatacagcgtgttcttggaattgtctctggagatggtgaatctgcccttcctggagtctgcgtagtatgtgctaccaccactaatggatgagacccactccagccccttccctggagcctggcggatccagctcatctcattgctactgacggtgaatccagaggctgcacaggagagtctcagggaccccctaggctgtaccaagcctcccccagactccaccagctgcacctcacactggacacctgcaaagtagacacacagactgctgagcgggctggcaaggc

SEQ ID NO: 2825 - DNA, 495 bp, Artificial Sequence
  source: /note="Description of Artificial Sequence: Synthetic polynucleotide"
gcctccctcgcgccatcaggtagacacccttatagcctgcccttctcatggaaccctctgctggcctcccacgtaccccacattctggcctgacccctcagaagccagaccactgtcggcctgggaagtccaactgtcgacgtagacacccttatagtcatgcacagtaatacaaggcggtgtcctcagttctcagactgttcatttgcagatacagggagtttttgctgttgtctctggagatggtgaatcggcccttcacagagtctgcatagtatgtgctaccaccatcccaactaataagagagacccactccagacccttccccggagcttgacggacccagtgcatggtataatcatcaaaggtgaatccagaggctgcacaggagagtctcagggaccccccaggctgtaccacgactcccccagactccaccagctgcacttcacactggacgtagacacccttatagctgagcgggctggcaaggc

SEQ ID NO: 2826 - DNA, 495 bp, Artificial Sequence
  source: /note="Description of Artificial Sequence: Synthetic polynucleotide"
gcctccctcgcgccatcaggtagacactacgcgttcctgcccttctcatggaaccctctgctggcctcccacgtaccccacattctggcctgacccctcagaagccagaccactgtcggcctgggaagtccaactgtcgacgtagacactacgcgtttcaacagtaatacacagccgtgtcctcgtctctcaggctgttcatttgcagatacagtgagttcttggcattgtctctggagatggtgaatcggcccttcacagagtctgcgtagtatatggtactactactactactaatgtatgaaacccactccagccccttccctggagcctggcggacccagttcatgctatagctactgaaggtgaatccagaggctgcacaggagagtctcagggaccccccaggctgtaccaagcctcccccagactccaccagctgcacctcacactggacaccgtagacactacgcgttctgagcgggctggcaaggc

SEQ ID NO: 2827 - DNA, 495 bp, Artificial Sequence
  source: /note="Description of Artificial Sequence: Synthetic polynucleotide"
gcctccctcgcgccatcaggtagacacctataaggcctgcccttctcatggaaccctctgctggcctcccacgtaccccacattctggcctgacccctcagaagccagaccactgtcggcctgggaagtccaactgtcgacgtagacacctataaggtcaacagtaatacacggctgtgtcctcggttttcaggctgttcatttgcagataggcgatgcttttggaatcatctcttgagatggtgaatctgcctttcacagacgcggcgtattctgttgtcccaccataagctttgcttctaatgaaacctacccactccagccccttccctggagcctggcggaaccagctcatagcataatcaccaaaggtgaatccagaagctgtacaggagagtctcagggaccgccctggctgtaccaagcctcccccagactccaccagctgcacctcacattggtagacacctataaggctgagcgggctggcaaggc

SEQ ID NO: 2828 - DNA, 495 bp, Artificial Sequence
  source: /note="Description of Artificial Sequence: Synthetic polynucleotide"
gcctccctcgcgccatcaggtagacactcttagtccctgcccttctcatggaaccctctgctggcctcccacgtaccccacattctggcctgacccctcagaagccagaccactgtcggcctgggaagtccaactgtcgacgtagacactcttagtctcaacagtaatacacggccgtgtcctcggctctcaggctgttcatttgaagatacagcgtgttcttggaattgtctctggagatggtgaatcggcccttcacggagtctgcgtagtatgtgctaccaccgctataaataactgagacccactccagccccttccctggagcctggcggacccagctcatgtagttgctactgacggtgaacccagaggctgcacaggagagtctcagggaccccccaggctggatcaagcctcctccagactccaccagctgcacctcacactggacacctgcgtagacactcttagtcctgagcgggctggcaaggc

SEQ ID NO: 2829 - DNA, 495 bp, Artificial Sequence
  source: /note="Description of Artificial Sequence: Synthetic polynucleotide"
gcctccctcgcgccatcaggtagacactgtctgcacctgcccttctcatggaaccctctgctggcctcccacgtaccccacattctggcctgacccctcagaagccagaccactgtcggcctgggaagtccaactgtcgacgtagacactgtctgcatcaacagtaatacacagccatgtcctcagctctcaggctgcccatttgaagatacagcgtgttcttggaattgtctctggagatggtgaatctgcccttcacagagtctgcataatatgtgctacccccattactactaatagctgaaacatattccagtcccttccctggagcctggcggacccagtgcatagcatagctactgaaggtgaatccagaggctgcacaggagagtctcagggaccccccaggctggaccaagccttccccagactccaccagctgcacctcacactggacaccgtagacactgtctgcactgagcgggctggcaaggc

SEQ ID NO: 2830 - DNA, 495 bp, Artificial Sequence
  source: /note="Description of Artificial Sequence: Synthetic polynucleotide"
gcctccctcgcgccatcaggtagacacgccattaacctgcccttctcatggaaccctctgctggcctcccacgtaccccacattctggcctgacccctcagaagccagaccactgtcggcctgggaagtccaactgtcgacgtagacacgccattaatcaacagtaatacacagccgtgtcctcagctctcaggctgttcatttgaagatacagcgtgttcttggaattgtctctggagatggtgaatcggcccttcacggagtctgcgtagtatgtgctaccacagctataaataactgagacccactccagccccttccctggagcctggcggacccagctcatgtagttgctactgacggtgaacccagaggctgcacaggagagtctcagggaccccccaggctggatcaagcctcctccagactccaccagctgcacctcacactggacacctgcgtagacacgccattaactgagcgggctggcaaggc

SEQ ID NO: 2831 - DNA, 495 bp, Artificial Sequence
  source: /note="Description of Artificial Sequence: Synthetic polynucleotide"
gcctccctcgcgccatcaggtagacacgactaagacctgcccttctcatggaaccctctgctggcctcccacgtaccccacattctggcctgacccctcagaagccagaccactgtcggcctgggaagtccaactgtcgacgtagacacgactaagatcaacagtaatacacggccgtgtcctcggttttcaggctgttcatttgcagatacagtgagttctttgaatcatctcttgagatggtgaatctgcctttcacagacgcggcgtattctgtggtgtaactgttagctttgtttctagtacggccaacccactccagccccttccctggagcctggcggacccagtccatgtagtggtcactgaaggtgaatccagaggctgcacaggagagtctcagggaccctccaggctggaccaagcctcccccagactccaccagctgcacctcacactggtagacacgactaagactgagcgggctggcaaggc

SEQ ID NO: 2832 - DNA, 495 bp, Artificial Sequence
  source: /note="Description of Artificial Sequence: Synthetic polynucleotide"
gcctccctcgcgccatcaggtagacacaggttgctcctgcccttctcatggaaccctctgctggcctcccacgtaccccacattctggcctgacccctcagaagccagaccactgtcggcctgggaagtccaactgtcgacgtagacacaggttgcttcaacagtaatacacggccgtgtcctcggttttcaggctgttcatttgcagatacgccgtgttctttgaatcatctctggagatggtgaacctgcctttcaccgacgcagcatatgctgtcgcgtaactgttagctttgcttctaatacggccaacccactccagccctttcccggaagcctggcggacccagtgcatagcagagccactgaaggtgaacccagaggctgcacaggagagtttcagggaccccccaggctggaccaagcctcccccggactccaccagctgcacctcacactggtagacacaggttgctctgagcgggctggcaaggc

SEQ ID NO: 2833 - DNA, 495 bp, Artificial Sequence
  source: /note="Description of Artificial Sequence: Synthetic polynucleotide"
gcctccctcgcgccatcaggtagacacctcgagaacctgcccttctcatggaaccctctgctggcctcccacgtaccccacattctggcctgacccctcagaagccagaccactgtcggcctgggaagtccaactgtcgacgtagacacctcgagaatcaacagtaatacacagccgtgtcctcggctctcagactgttcatttgcagatacagcgtgttcttggcgttgtctctggagatggtgaatcggcccttcacggagtccgcgtagcttgtgctactcccatcactattaatacgtgagacccacaccagccccttccctggagcttggcggacccagtgcatccagtagctactgaaggtgaatccagaggctgcacaggagagtctcagggaccccccaggctgaactaagcctcccccggactccaccagctgcacctcacactggacaccgtagacacctcgagaactgagcgggctggcaaggc

SEQ ID NO: 2834 - DNA, 495 bp, Artificial Sequence
  source: /note="Description of Artificial Sequence: Synthetic polynucleotide"
gcctccctcgcgccatcaggtagacacttaatggccctgcccttctcatggaaccctctgctggcctcccacgtaccccacattctggcctgacccctcagaagccagaccactgtcggcctgggaagtccaactgtcgacgtagacacttaatggctcaacagtaatacacagccgtgtcctcagctctcaggctgttcatttgcagatacagcgtgttcttggaattgtctctggagatggtgaatcggcccttcacggagtctgcatagtatttattacttccatcataccgtataaatgccacccactccagccccttgcctggagcctggcggacccagtgcatgccatagctactgaaggtgaatccagacgctgcacaggagagtctcagggaccccccaggctggaccacgcctcccccagactccaccagctgcacctgacactggacaccgtagacacttaatggcctgagcgggctggcaaggc

SEQ ID NO: 2835 - DNA, 495 bp, Artificial Sequence
  source: /note="Description of Artificial Sequence: Synthetic polynucleotide"
gcctccctcgcgccatcaggtagacactgcagacacctgcccttctcatggaaccctctgctggcctcccacgtaccccacattctggcctgacccctcagaagccagaccactgtcggcctgggaagtccaactgtcgacgtagacactgcagacatcaacagtaatacacagccgtgtcctcagctctcaggctgttcatttgaagatgcagcgtgttcttggaattgtctctggagatggtgaatctgcccttcctggagtctgcgtagtatgtgctaccaccactaatggatgagacccactccagacccttccctggagcctggcggacccagctcatctcattgctactgacggtgaatccagaggctgcacaggagagtctcagggaccccccaggctgtaccaagactccccgagactccaccagctgcacctcacactggacacctgcaaagtagacactgcagacactgagcgggctggcaaggc

SEQ ID NO: 2836 - DNA, 495 bp, Artificial Sequence
  source: /note="Description of Artificial Sequence: Synthetic polynucleotide"
gcctccctcgcgccatcaggtagacactcactgagcctgcccttctcatggaaccctctgctggcctcccacgtaccccacattctggcctgacccctcagaagccagaccactgtcggcctgggaagtccaactgtcgacgtagacactcactgagtcaacagtaatacacggccgtgtccgcggcggtcacagagctcagcttcagggagaactggttcttggacgtgtctactgacatggtgactcgactcttgagggaggggttgtagttggtgctcccactggtatagatacgcccaatccactccagtcccttcccggcgggctgccggatccagctccagtagtaactactgatggagccaccagagacagtgcaggtgagggacagggtctccgaaggcttcaccagtcctgggcccgactcctgcagctgcacctgggacaggacccctgtgtagacactcactgagctgagcgggctggcaaggc

SEQ ID NO: 2837 - DNA, 495 bp, Artificial Sequence
  source: /note="Description of Artificial Sequence: Synthetic polynucleotide"
gcctccctcgcgccatcaggtagacacgagtacgtcctgcccttctcatggaaccctctgctggcctcccacgtaccccacattctggcctgacccctcagaagccagaccactgtcggcctgggaagtccaactgtcgacgtagacacgagtacgttcaacagtaatacacggccgtgtccacggcggtcacagagctcagcttcagggagaactggttcttggacgtgtctactgacatggtgactcgactcttgagggacgggttgtagtaggtgctcccactataatagatgtacccaatccactccagtcccttccctgggggctgccggatccagccccaccagttactactgctgatggagtaaccagagacagcgcaggtgagggacagggtgtccgaaggcttcaccagtcctgggcccgactcctgcagctgcacctgggacaggaccacgtagacacgagtacgtctgagcgggctggcaaggc

SEQ ID NO: 2838 - DNA, 495 bp, Artificial Sequence
  source: /note="Description of Artificial Sequence: Synthetic polynucleotide"
gcctccctcgcgccatcaggtagacacatacgccacctgcccttctcatggaaccctctgctggcctcccacgtaccccacattctggcctgacccctcagaagccagaccactgtcggcctgggaagtccaactgtcgacgtagacacatacgccatcaacagtaatacacggccgtgtccgcggcggtcacagagctcagcttcagggagaactggttcttggacctgtctactgatatggtgactcgactcttgagggacgggttgtagtaggtgctcccactatgatagatgtacccaatccactccaggcccttccctggtggctgccggatccagctccaggagtaaccaccactgctgatggagccaccagagacagcgcaggtgagggacagggtctgtgaaggcttcaccagtcctgagccggactcctgcagctgcagctgggacaggacgtagacacatacgccactgagcgggctggcaaggc

SEQ ID NO: 2839 - DNA, 495 bp, Artificial Sequence
  source: /note="Description of Artificial Sequence: Synthetic polynucleotide"
gcctccctcgcgccatcaggtagacactcgcatcacctgcccttctcatggaaccctctgctggcctcccacgtaccccacattctggcctgacccctcagaagccagaccactgtcggcctgggaagtccaactgtcgacgtagacactcgcatcatcaacagtaatacacggccgtgtctgcggcagtcacagagctcagcttcagggagaactggttcttggacgtgtctactgatatggtaactcgactcttgagggacgggttgtagtaggtgctcccactgtaatagatgtacccaatccactccaggcccttccctgggggctggcggatccaactccagtagtaatcaccactgctgatggagccaccagagacagtgcaggtgagggacagggtctgtgaaggcttcaccagtcctgggcccgactcctgcagctgcacctgggacaggacgtagacactcgcatcactgagcgggctggcaaggc

SEQ ID NO: 2840 - DNA, 495 bp, Artificial Sequence
  source: /note="Description of Artificial Sequence: Synthetic polynucleotide"
gcctccctcgcgccatcaggtagacaccgcttaatcctgcccttctcatggaaccctctgctggcctcccacgtaccccacattctggcctgacccctcagaagccagaccactgtcggcctgggaagtccaactgtcgacgtagacaccgcttaattcaacagtaatacacggccgtgtccgcggcagtcacagagctcagcttcagggagaactggttcttagacgtgtctactgatatggtaactcgactcttgagggacgggttgtagtaggtgctcccactgtaatagatgtacccaatccactccaggcccttccctgggtgctggcggatccagctccagtagtaaccaccactgctgatggagccaccagagacagtacaggtgagggacagggtctgtgaaggcttcaccagtcctgggcccgactcctgcagctgcacctggggcaggacgtagacaccgcttaatctgagcgggctggcaaggc

SEQ ID NO: 2841 - DNA, 495 bp, Artificial Sequence
  source: /note="Description of Artificial Sequence: Synthetic polynucleotide"
gcctccctcgcgccatcaggtagacactggttatccctgcccttctcatggaaccctctgctggcctcccacgtaccccacattctggcctgacccctcagaagccagaccactgtcggcctgggaagtccaactgtcgacgtagacactggttatctcaacagtaatacacagccgtgtccgcggcggtcacagagctcagcttcagggagaactggttcttggacgtgtctactgatatggtgactcgactcttgagggacgggttgtagttggtgcttccactatgattgatttccccaatccactccagccccttccctgggggctggcggatccagctccagtagtaaccactgaaggacccaccatagacagcgcaggtgagggacagggtctccgaaggcttcaacagtcctgcgccccactgctgtagctgcacctgggacaggacccctgtgtagacactggttatcctgagcgggctggcaaggc

SEQ ID NO: 2842 - DNA, 495 bp, Artificial Sequence
  source: /note="Description of Artificial Sequence: Synthetic polynucleotide"
gcctccctcgcgccatcaggtagacacggattgctcctgcccttctcatggaaccctctgctggcctcccacgtaccccacattctggcctgacccctcagaagccagaccactgtcggcctgggaagtccaactgtcgacgtagacacggattgcttcaacagtaatacacagccgtgtctgcggcggtcacagagctcagcttcagggagaactggttcttggacgtgtctacggatatggtgactcgactcttgagggacgggttgtagtaggtgctcccactataatagatactcccaatccactccagccccttccctgggggctggcggatccagccccagtagtaactactactgctgatggagccaccagagacagtgcaggtgagggacagggtctccgaaggcttcaccagtcctgggcccgactcctgcagctgcagctgggacaggacgtagacacggattgctctgagcgggctggcaaggc

SEQ ID NO: 2843 - DNA, 495 bp, Artificial Sequence
  source: /note="Description of Artificial Sequence: Synthetic polynucleotide"
gcctccctcgcgccatcaggtagacacctcagtgacctgcccttctcatggaaccctctgctggcctcccacgtaccccacattctggcctgacccctcagaagccagaccactgtcggcctgggaagtccaactgtcgacgtagacacctcagtgatcaacagtaatacacggccgtgtccgcagcggtcacagagctcagcttcagggagaactggttcttggacgtgtctactgatatggtgactcgactcttgagggaggggttgtagttggtgctcccactgtaatagatatacccaatccactccagtcccttccctgggggctgccggatccagctccagtagtaactactgatggagccaccagagacagtgcaggtgagggacagggtctccgaaggcttcaccagtcctgggcccgactcctgcagctgcacctgggacaggacccctgtgtagacacctcagtgactgagcgggctggcaaggc

SEQ ID NO: 2844 - DNA, 495 bp, Artificial Sequence
  source: /note="Description of Artificial Sequence: Synthetic polynucleotide"
gcctccctcgcgccatcaggtagacacacgtactccctgcccttctcatggaaccctctgctggcctcccacgtaccccacattctggcctgacccctcagaagccagaccactgtcggcctgggaagtccaactgtcgacgtagacacacgtactctcaacagtaatacacggccgtgtccgcagcggtcacagagctcagcttcagggagaactggttcttggacgtgtctactgatatggtgactcgactcttgagggaggggttgtagttggtgctcccactgtaatagatatacccaatccactccagtcccttccctgggggctgccggatccagctccagtagtaaccaccactgctgacggagccaccagagacagtgcaggtgagggacagggtctccgaaggcttcaccagtcctgggcccgactcctgcagctgcacctgggacaggacgtagacacacgtactcctgagcgggctggcaaggc

SEQ ID NO: 2845 - DNA, 495 bp, Artificial Sequence
  source: /note="Description of Artificial Sequence: Synthetic polynucleotide"
gcctccctcgcgccatcaggtagacactgatgcgacctgcccttctcatggaaccctctgctggcctcccacgtaccccacattctggcctgacccctcagaagccagaccactgtcggcctgggaagtccaactgtcgacgtagacactgatgcgatcaacagtaatacacggccgtgtctgcggcggtcacagagctcagcttcagggagaactggttcttggacgtgtctactgatatggtgactcgactcttgagggacgggttgtagtaggtgctcccactatgatagatactcccaatccactccagccccttccctgggggctgccggatccagccccagtagtaaccactgctgatggagtaaccagagacagcgcaggtgagggacagggtctccgaaggcttcaccagtcctgggcccgactcctgcagctgcacctgggacaggaccccgtagacactgatgcgactgagcgggctggcaaggc

SEQ ID NO: 2846 - DNA, 495 bp, Artificial Sequence
  source: /note="Description of Artificial Sequence: Synthetic polynucleotide"
gcctccctcgcgccatcaggtagacacattaagcgcctgcccttctcatggaaccctctgctggcctcccacgtaccccacattctggcctgacccctcagaagccagaccactgtcggcctgggaagtccaactgtcgacgtagacacattaagcgtcaacagtaatacatggcggtgtccgaggccttcaggctgctccactgcaggtaggcggtgctgatggacttgtcggctgagatggtgacctggccttggaaggacgggctgtatctggtatcagagtcaccaggatagatgatccccatccactccaggcctttcccgggcatctggcgcacccagccgatccagtagctggtaaagctgtatccagaacccttacaggagatcttcagagactccccgggctttttcacctctgctccagactgcaccagctgcacctcggcacagactccgtagacacattaagcgctgagcgggctggcaaggc

SEQ ID NO: 2847 - DNA, 495 bp, Artificial Sequence
  source: /note="Description of Artificial Sequence: Synthetic polynucleotide"
gcctccctcgcgccatcaggtagacacagcaatcccctgcccttctcatggaaccctctgctggcctcccacgtaccccacattctggcctgacccctcagaagccagaccactgtcggcctgggaagtccaactgtcgacgtagacacagcaatcctcaacagtaatacatggcggtgtccgaggccttcaggctgctccactgcaggtaggcagtgctgatggacttgtcagctgagatggtgacgtggccttggaaggacgggctgtagttggtataagagtcactaggatcaatcctccccatccactccaagcctttcccgggcatctggcgcacccagctgatccagtagctggtaaagctgtatccagaacccttacaggagatcctcagagactccccgggctttttcacctctgctccagactgcaccagctgcacttcggcacagactccgtagacacagcaatccctgagcgggctggcaaggc

SEQ ID NO: 2848 - DNA, 495 bp, Artificial Sequence
  source: /note="Description of Artificial Sequence: Synthetic polynucleotide"
gcctccctcgcgccatcaggtagacacgcttagtacctgcccttctcatggaaccctctgctggcctcccacgtaccccacattctggcctgacccctcagaagccagaccactgtcggcctgggaagtccaactgtcgacgtagacacgcttagtatcaacagtaatacacagccgtgtcctcgggagtcacagagttcagctgcagggagaactggttcttggatgtgtctgggttgatggttattcgacttttcacagatactgcataatcattataccacttggacctgtagtatgtccttcccagccactcaaggcctctcgatggggactgcctgatccagttccaagcagcactgttgctagagacactgtccccggagatggcacaggtgagtgagagggtctgcgagggcttcaccagtcctggacctgactgctgcagctgtacctgtgagtagacacgcttagtactgagcgggctggcaaggc

SEQ ID NO: 2849 - DNA, 495 bp, Artificial Sequence
  source: /note="Description of Artificial Sequence: Synthetic polynucleotide"
gcctccctcgcgccatcaggtagacactgaccttgcctgcccttctcatggaaccctctgctggcctcccacgtaccccacattctggcctgacccctcagaagccagaccactgtcggcctgggaagtccaactgtcgacgtagacactgaccttgtcaacagtaatacacggcagtgtcctcagcctttaggctgcagatctgcagatatgccgtgctgacagaggtgtccaaggagaagacaaaccgtcctgtgaagccctgggcatacgttgggttcccagtgttggtgttgatccatcccatccactcaagcccttgtccaggggcctgtcgcacccaattcatagcatagctagtgaaggtgtatccagaagccttgcaggaaaccttcactgaggccccaggcttcttcaactcagacccagattgcaccagctgcacctgggagtgggcaccgtagacactgaccttgctgagcgggctggcaaggc

SEQ ID NO: 2850 - DNA, 495 bp, Artificial Sequence
  source: /note="Description of Artificial Sequence: Synthetic polynucleotide"
gcctccctcgcgccatcaggtagacaccaaggtcacctgcccttctcatggaaccctctgctggcctcccacgtaccccacattctggcctgacccctcagaagccagaccactgtcggcctgggaagtccaactgtcgacgtagacaccaaggtcatcaacagtaatacatggccatgtcctcagcctttaggctgctgatctgcaggtatgctgtgctggcagaggtgtccatggagaagacaaaccgtcctgtgaagccctgggcatatgttgggttcccagtgtaggtgttgaaccatcccatccactcaagcccttgtccaggggcctgtggcacccaattcataccataggtggtgaaactgtaaccagaagccttgcaggagaccttcactgaggccccaggctgcttcacctcatggccagactgcaccagctgcacctgggagtaggtaccgtagacaccaaggtcactgagcgggctggcaaggc

SEQ ID NO: 2851 - DNA, 495 bp, Artificial Sequence
  source: /note="Description of Artificial Sequence: Synthetic polynucleotide"
gcctccctcgcgccatcaggtagacaccactgtaccctgcccttctcatggaaccctctgctggcctcccacgtaccccacattctggcctgacccctcagaagccagaccactgtcggcctgggaagtccaactgtcgacgtagacaccactgtactcagggaatgtgcggccctgcccttggccatcacggagctcagctgcagggataactgggccttggatgtgtctctacagatggagagttggcccagaaaggctgggctgaagtgtgtgctgcccctggagctgaggtgccccagcgccttcccagagggctgctgggtccaggcccagaggtctgtgaggacctcaccagccctgggcatgactccagtagctgcatctgatgcaggacactcagggacaagaagcaaagagatgagtcacaagcggacaccacagcccacagcccccgttcgtagacaccactgtacctgagcgggctggcaaggc

SEQ ID NO: 2852 - DNA, 495 bp, Artificial Sequence
  source: /note="Description of Artificial Sequence: Synthetic polynucleotide"
gcctccctcgcgccatcaggtagacacgatgatcccctgcccttctcatggaaccctctgctggcctcccacgtaccccacattctggcctgacccctcagaagccagaccactgtcggcctgggaagtccaactgtcgacgtagacacgatgatcctcagtataaaaatccatggtggtttactcattgtgcgggtagctcagctgtaggaaaaactgttttctgaatgtggatctggaggtggtgactggactcttgagaagcgggttgcactgtgtgtttcctcgtgacctacacacctgacccacttcagcttcttccctgggggctggcagatacagctccaggaggaagtactggttatgattggaaatccagagacagcacaggtgaaggagagggtctctgagggctttactagaacatgagtgcactgaaaaacacaatttttttcatagggtagacacgatgatccctgagcgggctggcaaggc

SEQ ID NO: 2853 - DNA, 495 bp, Artificial Sequence
  source: /note="Description of Artificial Sequence: Synthetic polynucleotide"
gcctccctcgcgccatcaggtagacaccgccaatacctgcccttctcatggaaccctctgctggcctcccacgtaccccacattctggcctgacccctcagaagccagaccactgtcggcctgggaagtccaactgtcgacgtagacaccgccaatatcaataaaaatcatggttgtgtactccttgttaaggtagctcagctgtaggagaaactgttttttggatgtggatctggagatggtgactggactcttgaggagtgggttggattgtgcactccctcatgacctgtgcacctgattcgctccagtcccttccccggggggtgacggatccagctccagcaggaagcactggttgtaatggagaagcagagatgccacaggccagggggaggatctgtgagggcttcaccaggccaggagtgcaccgagaatcacagttgtcggcatgcacagggtagacaccgccaatactgagcgggctggcaaggc

SEQ ID NO: 2854 - DNA, 495 bp, Artificial Sequence
  source: /note="Description of Artificial Sequence: Synthetic polynucleotide"
gcctccctcgcgccatcaggtagacactcaagcctcctgcccttctcatggaaccctctgctggcctcccacgtaccccacattctggcctgacccctcagaagccagaccactgtcggcctgggaagtccaactgtcgacgtagacactcaagccttcacagtaatactcagccgtgtcctaggtggtcatggagctgagcttcacagagaactggctcttggttgagtcactgttgatggggacatggacctgggtggagggtgcatgatgtgtattccttgatgatccagtctagtaactgtgccccagccattccagcctgttgcccacgggatggtggattcatctcaaataatatccatggtaaaaaaaagaatccagacacagcacaggcagagggcagtgtctgagggcctcatgggtcctggacctgactcctgcagctgcacctgggacagtagacactcaagcctctgagcgggctggcaaggc

SEQ ID NO: 2855 - DNA, 495 bp, Artificial Sequence
  source: /note="Description of Artificial Sequence: Synthetic polynucleotide"
gcctccctcgcgccatcaggtagacacacgtgtgtcctgcccttctcatggaaccctctgctggcctcccacgtaccccacattctggcctgacccctcagaagccagaccactgtcggcctgggaagtccaactgtcgacgtagacacacgtgtgttcacttaaaaatgcgtagttgtgtgttcactgggcacagagctcagctgtaagaactgtttcttggatctggatatggactcttgagcagtgggttgtaatttgtgctcccttcacaacccatgcacctgatccactcctgtccatcttctaggggcaagcagatacaattctagcaggaaacactggttatgatggggaatccagagacagtgcaggtgaggagagggtctgcaaggagtctcaagccagaagtgtgctgagaaacatagttgttgatgttaacaggttctgggcaacacaggtagacacacgtgtgtctgagcgggctggcaaggc

SEQ ID NO: 2856 - DNA, 495 bp, Artificial Sequence
  source: /note="Description of Artificial Sequence: Synthetic polynucleotide"
gcctccctcgcgccatcaggtagacactccgtctacctgcccttctcatggaaccctctgctggcctcccacgtaccccacattctggcctgacccctcagaagccagaccactgtcggcctgggaagtccaactgtcgacgtagacactccgtctatcagctctaaaatacatggctatgtgtttgttcctcacatagttcagctgtaagaagaactactttttggacatggatctggagatggtgactggactcttgagaagaggggagtaatttgtgctccctccatgacctatgcacccgatccactccagtacctcccatgggggcgctgatggatgcagctccagcaggaaacactggttgtgatggagaatgcagagatggcacaggtgagggagaggttctgtgaaggcttcaccaggccaagagtgcaccgagaaatacagttgttggcaggtagacactccgtctactgagcgggctggcaaggc

SEQ ID NO: 2857 - DNA, 495 bp, Artificial Sequence
  source: /note="Description of Artificial Sequence: Synthetic polynucleotide"
gcctccctcgcgccatcaggtagacacaagagctgcctgcccttctcatggaaccctctgctggcctcccacgtaccccacattctggcctgacccctcagaagccagaccactgtcggcctgggaagtccaactgtcgacgtagacacaagagctgtcattcaaaatgtgtagttgtgtgttcactgggcacagagctcagctgtaagaactgtttcttggatctggatatggactcttgagaagtgggatgtaatttttgctccctttacaacccatgaacctgatccactcctgtccatcttctaggggcaagcagatacaattctagcaggacacactggttatgatggggaatccagagacagtgcaggtgagggagagggtctgtgaggatgtctcaagccagaagtgcactggaaaacacagttgttgatgttaacagtttctggacaacacggtagacacaagagctgctgagcgggctggcaaggc

SEQ ID NO: 2858 - DNA, 495 bp, Artificial Sequence
  source: /note="Description of Artificial Sequence: Synthetic polynucleotide"
gcctccctcgcgccatcaggtagacactatcgctccctgcccttctcatggaaccctctgctggcctcccacgtaccccacattctggcctgacccctcagaagccagaccactgtcggcctgggaagtccaactgtcgacgtagacactatcgctctcagctctaaaatacatggctatgtgtttgttgctcacatagttcacctgtaagaagaagtactttttggacatggatctggagatggtgactggactcttgagaagaggggagtaatctgtgctccctccatgacctatgcacccgatccactccagtacctcccatgggggcgctgatggatgcagctccagaaggaaacactggttgtgatggagaatgcagagatggcacaggtgagggagaggttctgtgaaggcttcaccaggccaagagtgcaccgagaaatacagttgttggcaggtagacactatcgctcctgagcgggctggcaaggc

SEQ ID NO: 2859 - DNA, 495 bp, Artificial Sequence
  source: /note="Description of Artificial Sequence: Synthetic polynucleotide"
gcctccctcgcgccatcaggtagacactcagatgccctgcccttctcatggaaccctctgctggcctcccacgtaccccacattctggcctgacccctcagaagccagaccactgtcggcctgggaagtccaactgtcgacgtagacactcagatgctcatgaaagaagaattcatgtgcagacacatctgcttgtctgaagatatagtgcatgtgggaacatgtgggcttgtctgaattcatgataagtgggctggaattcatcctccactcatcacgtatgcacctgacccactcctgtgctttccatccagtgcctacaggaagcactgattgtgacagagaatccagaggcagcacaggtgagtgagggggtttgcaagggcttcaccaggctgataattgactgagaaaaacagttgttagcatgcacaagttctggatgatacattggaaacccgtagacactcagatgcctgagcgggctggcaaggc

SEQ ID NO: 2860 - DNA, 495 bp, Artificial Sequence
  source: /note="Description of Artificial Sequence: Synthetic polynucleotide"
gcctccctcgcgccatcaggtagacacgtgtagcacctgcccttctcatggaaccctctgctggcctcccacgtaccccacattctggcctgacccctcagaagccagaccactgtcggcctgggaagtccaactgtcgacgtagacacgtgtagcatcaacagtaatacaaaccatgtcctcagatgtcacagagctcaggtatagtcaaaattgtttcttggatgaatctctggagaaggagagttggctctgcagagatggatcatcgtgtgtgtcacccttgcaatgtgttcctgacagcccatggaagcgggctagtggattcagctccagcagtaactgttggttgggatggacaacccagaaatggggcatgtgaggaagagaaaatgaaagtggatagcctgttaccgaaaactgctggactaagacacttgtaagcctgtcaatctcagtggtagacacgtgtagcactgagcgggctggcaaggc

SEQ ID NO: 2861 - DNA, 495 bp, Artificial Sequence
  source: /note="Description of Artificial Sequence: Synthetic polynucleotide"
gcctccctcgcgccatcaggtagacactggcagttcctgcccttctcatggaaccctctgctggcctcccacgtaccccacattctggcctgacccctcagaagccagaccactgtcggcctgggaagtccaactgtcgacgtagacactggcagtttcacagccaagatatggaaactaagtgtctgtcaatgggcaaatggataaagacaatgtggtatgtgtacacaacatagcattattatgccttataaaataaggaaatgctgccattttccacaagacaaatggactcccaccaccactagcaatggattttatccattgcagcccctccctgagagccggcagatccaggtccactagtaaggactggttgtgacggagtggccagtaacagtgtaggtgaggcagagggtaagtgtgtgctattcaggtccagggctgactcctgcagctggtagacactggcagttctgagcgggctggcaaggc

SEQ ID NO: 2862 - DNA, 495 bp, Artificial Sequence
  source: /note="Description of Artificial Sequence: Synthetic polynucleotide"
gcctccctcgcgccatcaggtagacaccagtccaacctgcccttctcatggaaccctctgctggcctcccacgtaccccacattctggcctgacccctcagaagccagaccactgtcggcctgggaagtccaactgtcgacgtagacaccagtccaatcagtgtaaaaattcatggttgtgtactcgttgctcaggtagctcagctgtagaagaaactgtgttttggatgtggatctggagatggtgactggactcttgaggcgtgggttgcgttgtgttctccctcatgacctgtgcacctgattcactccagtcccttccctggggagctgagggatccagctccagcaggaagcactggttgtgatggagaagcagagacagcacagatgagggagagggtctgtgagggcttcgccaggccaagaacgcacgagaaatacagatgtcggcatgcacgtagacaccagtccaactgagcgggctggcaaggc

SEQ ID NO: 2863 - DNA, 495 bp, Artificial Sequence
  source: /note="Description of Artificial Sequence: Synthetic polynucleotide"
gcctccctcgcgccatcaggtagacacgtgtctaccctgcccttctcatggaaccctctgctggcctcccacgtaccccacattctggcctgacccctcagaagccagaccactgtcggcctgggaagtccaactgtcgacgtagacacgtgtctactcaagtaatacaaggttgtggcattgttggtcacagaactcagctaaaagaaaatttggttcttggacgtggatctggagatggtgactgagctcatgaggagtgggttagaatttgtgctccctcgtgacctatgccctgatccactcccttgactgaggactggcggatccagctccagcaggaagcactagttgtgatggagaatccagagacagcacaggtgagggagggggtctgtgagggcctcaccaggccaataaatgaccatgaaacacagtggttggtgtgcatggcttctgggtagacacgtgtctacctgagcgggctggcaaggc

SEQ ID NO: 2864 - DNA, 495 bp, Artificial Sequence
  source: /note="Description of Artificial Sequence: Synthetic polynucleotide"
gcctccctcgcgccatcaggtagacacgtacagtgcctgcccttctcatggaaccctctgctggcctcccacgtaccccacattctggcctgacccctcagaagccagaccactgtcggcctgggaagtccaactgtcgacgtagacacgtacagtgtcataaaaatacatggctgtgtgcttgtgactcacttagctcggctgtaggaagaactgctttttggacatggatctggagatggtgactggactcttgaggagtgggttggaatgtgcactccctcatgacctgtgcactggattcactccagtcccttcctggggggtttatgaatgcagctacagcaggaagcactggttgtgatggggaatccagagacagcacaggtgagggagagggtctgtgagggcttcaccaggccaagtgggcactgagaaacacagttgttggcatgcacaggtagacacgtacagtgctgagcgggctggcaaggc

SEQ ID NO: 2865 - DNA, 495 bp, Artificial Sequence
  source: /note="Description of Artificial Sequence: Synthetic polynucleotide"
gcctccctcgcgccatcaggtagacacggatcatccctgcccttctcatggaaccctctgctggcctcccacgtaccccacattctggcctgacccctcagaagccagaccactgtcggcctgggaagtccaactgtcgacgtagacacggatcatctcatttaaaacatggctgtgagcttgttgctcacatagctccactgtaaaaacaagtgttttttggacccgaatttggagatggtgactggattcataaggagtgggtgggaatttttgctcccttcatgacgtgtgcgcctggtccactccagtccttcccatgtggactcgtggatccagctccagcaggaaacactggttgtgatggaaaatccagagacagcacaggtgagggagagggtctgcgagggctccaccaggccaagagtgcactaagaaacacagttgtttgtgagcacaggtagacacggatcatcctgagcgggctggcaaggc

SEQ ID NO: 2866 - DNA, 495 bp, Artificial Sequence
  source: /note="Description of Artificial Sequence: Synthetic polynucleotide"
gcctccctcgcgccatcaggtagacactattggcgcctgcccttctcatggaaccctctgctggcctcccacgtaccccacattctggcctgacccctcagaagccagaccactgtcggcctgggaagtccaactgtcgacgtagacactattggcgtcatgaaaaatatatggctatgtgattgttgctcatgtagctcagctgtaggaagaactgtttttggacatggatctggggatggtgactggactcttgaggaaaggggagtaatgtgtgctcccttcatcatctatggacccaatccactccattccctcccagagagggggtgatggatgcagatccaggaggaagcactggttgtgatggagaatgcagagatgacacacatgagggagagggtctttgggggcttcaccaggccaagagtgcaccgagaaacacagttgttggcaggcagtagacactattggcgctgagcgggctggcaaggc

SEQ ID NO: 2867 - DNA, 495 bp, Artificial Sequence
  source: /note="Description of Artificial Sequence: Synthetic polynucleotide"
gcctccctcgcgccatcaggtagacacaggcttgacctgcccttctcatggaaccctctgctggcctcccacgtaccccacattctggcctgacccctcagaagccagaccactgtcggcctgggaagtccaactgtcgacgtagacacaggcttgatcaattaaaattcatggttgtgtacttgttgctcaggtagctcagctacaggaaacactgttttttggatgtggatctggagatagtgactggactcttgaggagtgggttggaatgtgcactccctcatgacctgtgcacctgattcgctccagtcccttccttgcggggggtgatggatgcagctccagcaggaagcactggttgtgatggagaatgcagagacagcacaggtgagagagagggtctgtgagagcttcactagcccaagagtgcaggagaaacacagttgttggcatgcacgtagacacaggcttgactgagcgggctggcaaggc

SEQ ID NO: 2868 - DNA, 495 bp, Artificial Sequence
  source: /note="Description of Artificial Sequence: Synthetic polynucleotide"
gcctccctcgcgccatcaggtagacacacacacgtcctgcccttctcatggaaccctctgctggcctcccacgtaccccacattctggcctgacccctcagaagccagaccactgtcggcctgggaagtccaactgtcgacgtagacacacacacgttcagcttaaaaatacatggctatgtgcttgttgctcatgtagctcagctgtaggaagaactgcttttttggacacggatctggggatggtgactggacacttgaggagtgggtggtaatgtgtgctcccttcatgacctatgcacccaatccactccattcccttccctggggggctgatggatccagcttcagcaggaagacctcgttatcacggggaacacagacacagcgcaggtaagggagagggtctgtgagggcttcaccaggccaagagtgcgctgagaaacacagttgttggcatgtagacacacacacgtctgagcgggctggcaaggc

SEQ ID NO: 2869 - DNA, 495 bp, Artificial Sequence
  source: /note="Description of Artificial Sequence: Synthetic polynucleotide"
gcctccctcgcgccatcaggtagacactagacggacctgcccttctcatggaaccctctgctggcctcccacgtaccccacattctggcctgacccctcagaagccagaccactgtcggcctgggaagtccaactgtcgacgtagacactagacggatcaagtaatacatgaccttgtccttggctttcagattggtcattgtaaggcagactgcacttaaaagggtgttgcttgagattgttaatttatttgtactcatggaaagtaaccctgagaattcatacttgatcactcactgttggcacccacacctatccctgttgtgaagcgtgctggaccaagctcatgctgtaaccagtaaaggtgaaaccagaggctttgcaggagagtctcaccactgggctgtaaattttttccccctctgactccatcagtaaacttcacacaggacttccgtgagtagacactagacggactgagcgggctggcaaggc

SEQ ID NO: 2870 - DNA, 495 bp, Artificial Sequence
  source: /note="Description of Artificial Sequence: Synthetic polynucleotide"
gcctccctcgcgccatcaggtagacacgagcgatacctgcccttctcatggaaccctctgctggcctcccacgtaccccacattctggcctgacccctcagaagccagaccactgtcggcctgggaagtccaactgtcgacgtagacacgagcgatatcaagtaatacactgcctactcctcagctttccagtagataattttaagggagattgtgatgttaagtgttgtccccaggaactgtgaatcttctttgtgctggagcagagcaccactgagaacttccacttgggtcactcatggctaccacccactccagcccctctcctccagccatcagggcccaataaatgctgcagtcagtgaaggtgaatcttgatgctttgcagaagaagctaagagaatagccaggctattttgccaaagacaaaaatatagatccagtaaacctttgtggttttgtagacacgagcgatactgagcgggctggcaaggc

SEQ ID NO: 2871 - DNA, 495 bp, Artificial Sequence
  source: /note="Description of Artificial Sequence: Synthetic polynucleotide"
gcctccctcgcgccatcaggtagacacgcatctgacctgcccttctcatggaaccctctgctggcctcccacgtaccccacattctggcctgacccctcagaagccagaccactgtcggcctgggaagtccaactgtcgacgtagacacgcatctgatcaagtaatacacggacttttcctgagctctcaggttaatcatcttaaaagagaatctcctgaactgagtgtatttgaggattgttaatcatctttttactcaaggagagtcccactgagaacttctatttgaattattgttattacccacacccacccctgtcatgaagcctgctggatcaagcttatgctgttttcagtgaaagtgaatccagaggctttgcagaaaaggcagaattcctggtctgtagtatttctctgtctaactccattagttaacttcacaggggacttctgaaaacagtagacacgcatctgactgagcgggctggcaaggc

SEQ ID NO: 2872 - DNA, 495 bp, Artificial Sequence
  source: /note="Description of Artificial Sequence: Synthetic polynucleotide"
gcctccctcgcgccatcaggtagacactgctacaccctgcccttctcatggaaccctctgctggcctcccacgtaccccacattctggcctgacccctcagaagccagaccactgtcggcctgggaagtccaactgtcgacgtagacactgctacactcaagtattacaaggccttgtccttgactttcagtttggtccctttaaggtagactgcacatgaaaaggtgtcgcttgggactgttaatttatttgtactcatggagagtaactctgagaactcccacttgatcactcactgtttccacccacaccaatccctgtcatgaagcctgctggaccaagctcatgctgtagccagtaaaggtgaaatcagaggctttgcatgagagtctcagtgaaccactgggctgtacaattttcccccctgactctatcagtaaatttcacacaggacttctggtagacactgctacacctgagcgggctggcaaggc

SEQ ID NO: 2873 - DNA, 495 bp, Artificial Sequence
  source: /note="Description of Artificial Sequence: Synthetic polynucleotide"
gcctccctcgcgccatcaggtagacacaactgccacctgcccttctcatggaaccctctgctggcctcccacgtaccccacattctggcctgacccctcagaagccagaccactgtcggcctgggaagtccaactgtcgacgtagacacaactgccatcactgtaatatacggccttgcccttggctttcaggttggtccttgtaaggtagactgcacttgaaagggtgtcacttgggaatgttgatttatctgtactcatggagagtaacccttagaactcccatatgatctctcactgttgctacccacaccaattcctgttgtgaagcgtgctggaccaagctcatgctgcacccagtaaacccgaaaccagaggctttgcaggacagtctcagtgaactgctgggctgttaaatttttctccttctgactccatcagtaaacatcacacaggacttgtagacacaactgccactgagcgggctggcaaggc

SEQ ID NO: 2874 - DNA, 495 bp, Artificial Sequence
  source: /note="Description of Artificial Sequence: Synthetic polynucleotide"
gcctccctcgcgccatcaggtagacacttggactgcctgcccttctcatggaaccctctgctggcctcccacgtaccccacattctggcctgacccctcagaagccagaccactgtcggcctgggaagtccaactgtcgacgtagacacttggactgtcaagtaatacacagacttgtcttgggctctcagttttattatcttaaaagagaatcttctgaacagtgtctctgaggactgttaatcttctttgtactgaaggcgagtcccattgagaacttccacttgaattactgttatctccctcaccaacacttgccatgaatcctgctggaccaaacttgttcttttttcagtgaatccaggggctttgcagaacagtctgagaattcttggtctgtagtattttcctgtctgactccactagttaacttcacagaggacttctgcacacacagagggtagacacttggactgctgagcgggctggcaaggc

SEQ ID NO: 2875 - DNA, 495 bp, Artificial Sequence
  source: /note="Description of Artificial Sequence: Synthetic polynucleotide"
gcctccctcgcgccatcaggtagacactcggtactcctgcccttctcatggaaccctctgctggcctcccacgtaccccacattctggcctgacccctcagaagccagaccactgtcggcctgggaagtccaactgtcgacgtagacactcggtacttcacagtaataaacggaattttcctgagctctcaggttaatcatcttaagagagaatcatctgaaaagcgtgtctctgaggactgttaatcttctttgtactcaaggagagtcccactgagaacttccacttgaattactgatgttatcacctacacccacccctgtcatgaagcctgctggaccaagcttatgctgttttcagtgaaagtgaatccacagggtttccagaaaagtctgagaattcttggtctgtagtatttctctgagagactccagtaattaacttcacaggggacctctggtagacactcggtactctgagcgggctggcaaggc

SEQ ID NO: 2876 - DNA, 495 bp, Artificial Sequence
  source: /note="Description of Artificial Sequence: Synthetic polynucleotide"
gcctccctcgcgccatcaggtagacacccatggatcctgcccttctcatggaaccctctgctggcctcccacgtaccccacattctggcctgacccctcagaagccagaccactgtcggcctgggaagtccaactgtcgacgtagacacccatggattcacacagttaaatgctgccatgttctgggttctcaggctgttcatttgcatgtacagcatgtacttggtgttgtctctggaagtggtgagtctgcccctaacatagtctgcattgtattgatgactttcactacgccatataactgcaacccattccagccccttccctgaggcctggcaaacccagtgaatctcatagatactgaaggtgaaccaagaggctgcacaggagagcctcaggggcccctctcagtgtaccaagtctcccccagactctgtaagctgggcctcaccctggatacgtagacacccatggatctgagcgggctggcaaggc

SEQ ID NO: 2877 - DNA, 495 bp, Artificial Sequence
  source: /note="Description of Artificial Sequence: Synthetic polynucleotide"
gcctccctcgcgccatcaggtagacacacgaagatcctgcccttctcatggaaccctctgctggcctcccacgtaccccacattctggcctgacccctcagaagccagaccactgtcggcctgggaagtccaactgtcgacgtagacacacgaagattcacagtaatacactgcctacccctgtgagagccccctcagcttccaagtagattattttaagggagactgtgctggtaattggtgtccctgggaattgtgaatcttcattatgctgatgcagaatatcactgagaacttccacttgaatcaatcactgttaccacccactccagcctctgtcccccagccatctgggctcaatttatgctgtagtcagtgaaggtgaatcttgatgctttgcaaaagaggctaagagaacagccaggctgttttgccaaagataaaaatatagatccagtaagtagacacacgaagatctgagcgggctggcaaggc

SEQ ID NO: 2878 - DNA, 495 bp, Artificial Sequence
  source: /note="Description of Artificial Sequence: Synthetic polynucleotide"
gcctccctcgcgccatcaggtagacacactgtggacctgcccttctcatggaaccctctgctggcctcccacgtaccccacattctggcctgacccctcagaagccagaccactgtcggcctgggaagtccaactgtcgacgtagacacactgtggatcaacagtattacacaaccttgtccttggctttcaggttagtcattgtaaggtagagtgcacgtgaaagggtgtcgctggaccagttaatttatttgtactcatgaagagtaaacctgagcactcccacttgttgactcactgttgccagccaccacaatccctgttgtgaagcctgctggaccaacctcaggctgttgccagaaaaggtgaatccagacgctttgcaagaaagtctcagtgaaccactgggctgtactacgtttacccctctgactccaccactgaacttcatacaggacttgtagacacactgtggactgagcgggctggcaaggc

SEQ ID NO: 2879 - DNA, 495 bp, Artificial Sequence
  source: /note="Description of Artificial Sequence: Synthetic polynucleotide"
gcctccctcgcgccatcaggtagacacggtgtcatcctgcccttctcatggaaccctctgctggcctcccacgtaccccacattctggcctgacccctcagaagccagaccactgtcggcctgggaagtccaactgtcgacgtagacacggtgtcattcaagtaatacatggccttctcctcggctctcaggttggtcattttgagggagactgtgctgacaagggtgtccctgaggattatgatttttctttgtattgatggagggtaccactaacaaattccacttgaatccctcgcttttgcctcccacaccaacccctgtcctgaagcctgctgggctgagctcatgctagagtcaatgaaggtaaattcagaggctttgtaaaaaaggctctgagaacagttaggctgtatcatttctcttccagattccaccagtgaacttcttgtaggactctgtagacacggtgtcatctgagcgggctggcaaggc

SEQ ID NO: 2880 - DNA, 495 bp, Artificial Sequence
  source: /note="Description of Artificial Sequence: Synthetic polynucleotide"
gcctccctcgcgccatcaggtagacactcgtgaagcctgcccttctcatggaaccctctgctggcctcccacgtaccccacattctggcctgacccctcagaagccagaccactgtcggcctgggaagtccaactgtcgacgtagacactcgtgaagtcacagtaatacaaggtcttgtccttggctttcacattggtcattttaaggtagactgcacttgaaagggtgttgcttgggactgttaatttacttgtactcatggagagtaaccctgataactcactgttgccacccacacaaatccctgtcatgaagcctgctggaccaagctcatgctgtagccagtacaagtgaaatcagaggctttgcaggagagtctgtgagaaccgctgggctgtacaatgtttccccctctgactccatcagtaagcttcaacaggacttacatgaacacagagggtagacactcgtgaagctgagcgggctggcaaggc

SEQ ID NO: 2881 - DNA, 495 bp, Artificial Sequence
  source: /note="Description of Artificial Sequence: Synthetic polynucleotide"
gcctccctcgcgccatcaggtagacaccactagctcctgcccttctcatggaaccctctgctggcctcccacgtaccccacattctggcctgacccctcagaagccagaccactgtcggcctgggaagtccaactgtcgacgtagacaccactagcttcacacagtaatacacgcctgcatccccagccatcacacttctcagctgtaagttttcttgttttttactatgtgtttctggagatgctagctctgccctgaaggttggggcttagtgtttcccttaacccatatcacaccaacacactgaagaccttttgatgggagatggtggatccaggaaacagaatgttcagaaattgaatgtgcataggcggcataggtgaggctgagcatgaccaaggggaccactacttcttcctcccattgcacaaggtggtcctcactgtgaacccctgagaagtagacaccactagctctgagcgggctggcaaggc

SEQ ID NO: 2882 - DNA, 495 bp, Artificial Sequence
  source: /note="Description of Artificial Sequence: Synthetic polynucleotide"
gcctccctcgcgccatcaggtagacacggtcaactcctgcccttctcatggaaccctctgctggcctcccacgtaccccacattctggcctgacccctcagaagccagaccactgtcggcctgggaagtccaactgtcgacgtagacacggtcaacttcagcacagtagtacacatctatgtcctcagatctctgactgctcagctccatgtaggctgtgctcgtggacgtgtccctggtcatggtgactctgccctgaaacttctgtgcatagcctgtgttaccattgccagagtagctccctaccatccattcaaacccttatccaggggcctgtcacacacagtgaatgtcgtagctggcgaaggtgtatccagagctttgcaggagaccttcactgaggccatggacgctggcaacaggagagtcatcagaagctgggtgagtcatataatcaggagtagacacggtcaactctgagcgggctggcaaggc

SEQ ID NO: 2883 - DNA, 495 bp, Artificial Sequence
  source: /note="Description of Artificial Sequence: Synthetic polynucleotide"
gcctccctcgcgccatcaggtagacactacgtacgcctgcccttctcatggaaccctctgctggcctcccacgtaccccacattctggcctgacccctcagaagccagaccactgtcggcctgggaagtccaactgtcgacgtagacactacgtacgtcaacaggaatacacgaccatgtcttcagatctcaggctgctcagctccatgtaggctgtgctcacggacctgtcactggtaatggtgactctgccccggaacttctgtgcgtagtgtgtgttatcattgtaagggttgatgcatcccaaccactatgcccttgtccagggccctgtcgcacccactgtgtaaagtatttggtgaaggtgtatctggaagcctggccaggagaccttcactgaggacgcaggcttcttcacctcagccccaggctgcaacagctgaacctgggaatggacatcgtagacactacgtacgctgagcgggctggcaaggc

SEQ ID NO: 2884 - DNA, 495 bp, Artificial Sequence
  source: /note="Description of Artificial Sequence: Synthetic polynucleotide"
gcctccctcgcgccatcaggtagacacatgacacccctgcccttctcatggaaccctctgctggcctcccacgtaccccacattctggcctgacccctcagaagccagaccactgtcggcctgggaagtccaactgtcgacgtagacacatgacacctcacacagtaatacatggccgtgtcttcagatctcaggctgctcagctccatgtaggctgtgctcgtggatgtgtccctggtcatggtgactctgccctggaacttctctgcgtagcttatgctgccatcactagggcacatccttcccatccactcaagcccttgtgcatgggcctggcgcacctagtgcatagagtaactggtgaaggtaggtgtatccacaagtcttgcaggagactttcactgatgccccagccttcttcatctcatccccagactgcaccagctgcacctgggactgggtagacacatgacaccctgagcgggctggcaaggc

SEQ ID NO: 2885 - DNA, 495 bp, Artificial Sequence
  source: /note="Description of Artificial Sequence: Synthetic polynucleotide"
gcctccctcgcgccatcaggtagacaccttcacgacctgcccttctcatggaaccctctgctggcctcccacgtaccccacattctggcctgacccctcagaagccagaccactgtcggcctgggaagtccaactgtcgacgtagacaccttcacgatcacccagtaatacacagccgagtcctcagatctcaggctgctcagctctatgtaggctgtcctcagggacatgtccctggtaatggtgactctgccctggaacttctttgcatagttggtgttaccattgtaaagtgtgatccatctcatcctttcaagcccttgtccaggggcctgttgcaaccagtgcaaggagcagcaagtgaaggtgtatccggaagccttgcaggagaccttcactgaggccccaggcttctttacctcagcctcagactgccccagctgcacctgggagcagacacgtagacaccttcacgactgagcgggctggcaaggc

SEQ ID NO: 2886 - DNA, 495 bp, Artificial Sequence
  source: /note="Description of Artificial Sequence: Synthetic polynucleotide"
gcctccctcgcgccatcaggtagacacagaatcagcctgcccttctcatggaaccctctgctggcctcccacgtaccccacattctggcctgacccctcagaagccagaccactgtcggcctgggaagtccaactgtcgacgtagacacagaatcagtcacacagtaatacacgaccatgtcttcagatctcaggctgctcagctccatgtaggctgtgctcatggacctgtcactggtaatggtgactctgccccagaacgtctgtgcatagtgtgtgttatcattgtaagggttgattcatcccatccactatgcccttgtccagggctttgtcacacccaccgtgtaaagtatttggtgaaggtgtatctggaagcctggcaggagaccttcactgaggacccaggcttcttcacctcagccccaggctgcaacagctgaacctgggaatggacaccgtagacacagaatcagctgagcgggctggcaaggc

SEQ ID NO: 2887 - DNA, 495 bp, Artificial Sequence
  source: /note="Description of Artificial Sequence: Synthetic polynucleotide"
gcctccctcgcgccatcaggtagacacagttatgccctgcccttctcatggaaccctctgctggcctcccacgtaccccacattctggcctgacccctcagaagccagaccactgtcggcctgggaagtccaactgtcgacgtagacacagttatgctcatgcacagtaatgtgtggctgtgtccacaatgtccatgttgatcactgttagaaccacttcattcttggaggtgtccttggagataatgagcctactcttcagagatgggctgtagtatttattatcattctaataaatgtgtgcaagccactccagggcctttgctgagggctgacagatctaacccacacccattccagaagtgctgagtgagaacccagagaaggtgcaggtcagcatgagggtctgtgtgggtttcaccagtgcaggaccagactccttcaaggtgacctgggataagtagacacagttatgcctgagcgggctggcaaggc

SEQ ID NO: 2888 - DNA, 495 bp, Artificial Sequence
  source: /note="Description of Artificial Sequence: Synthetic polynucleotide"
gcctccctcgcgccatcaggtagacacaggtctcacctgcccttctcatggaaccctctgctggcctcccacgtaccccacattctggcctgacccctcagaagccagaccactgtcggcctgggaagtccaactgtcgacgtagacacaggtctcatcacagagtcatatgcagctgcatcctctgccctcagtctgttcatttgcagatacagtgagtttttggtattgtctctggaaatggtgaatcggcccttcacagagtctgcgtagtacatggtactaccactaccactaataactgggacccactgcagacccttccctggagcctgggggacccagtgcgtgctatggctactgaaggtgaatccagaggctgcacaggagagtctcagggacacccaggctttgtcaagtttgctccagactctaccagctgcatctcacactggacaccgtagacacaggtctcactgagcgggctggcaaggc

SEQ ID NO: 2889 - DNA, 495 bp, Artificial Sequence
  source: /note="Description of Artificial Sequence: Synthetic polynucleotide"
gcctccctcgcgccatcaggtagacacgtcatagtcctgcccttctcatggaaccctctgctggcctcccacgtaccccacattctggcctgacccctcagaagccagaccactgtcggcctgggaagtccaactgtcgacgtagacacgtcatagttcacacagtaatacacagccatgtcctcgggcctcaggctgttcatttgctgatacaggaagttcctggaattgtctctggagatgatgaatcggcccttcacagagtctgcatagtgcgtcctactgccattccaactaacacccgatacccactccagcccctttcctggagcctggcggacccagttcatgtcactgttactgaaggtgaatccagaggctgcacaggagagtctcagggaccccccaggctctaccaagcctcccccagactccaccagctgcactgttgtacccaggtgtagacacgtcatagtctgagcgggctggcaaggc

SEQ ID NO: 2890 - DNA, 495 bp, Artificial Sequence
  source: /note="Description of Artificial Sequence: Synthetic polynucleotide"
gcctccctcgcgccatcaggtagacacgtgacttgcctgcccttctcatggaaccctctgctggcctcccacgtaccccacattctggcctgacccctcagaagccagaccactgtcggcctgggaagtccaactgtcgacgtagacacgtgacttgtcaacagtaatacacggccgtgtcctcggttttcaggctcttcatttgcagataggtgatgcttttggaatcatctcttgagattgtgaatctgcctttcacagacgtggtctattctgttgtcccaccattagctttgtttctaatgaaacctacccattccagccccttcccgggagcctggcggaccccgctcatgtagtagtaactgaaggtgaatccagaggctgcacaggagagtctcagggaccccccaggctgtaccaagcctcccccagactccaccagctgcacctcacactggtagacacgtgacttgctgagcgggctggcaaggc

SEQ ID NO: 2891 - DNA, 495 bp, Artificial Sequence
  source: /note="Description of Artificial Sequence: Synthetic polynucleotide"
gcctccctcgcgccatcaggtagacacgattgcagcctgcccttctcatggaaccctctgctggcctcccacgtaccccacattctggcctgacccctcagaagccagaccactgtcggcctgggaagtccaactgtcgacgtagacacgattgcagtcaacactaatagagggccgtgtcctcggttttcaggctgttcatttgcagatgaagtgtgttcttggcgttatctctggaggtattgaatcggtccttaccggagtctatgaggtatgtgctacccccattaggattaacttgtcaaaccaactccagcccattccctggagcctggcggacacagttcatgtagtagctactgaaggtgaattgagaggctgcacaggagagtctcggggaccacgcaggctttgccaagcctcccccagactccaccagctgcatctcacactggataccgtagacacgattgcagctgagcgggctggcaaggc

SEQ ID NO: 2892 - DNA, 495 bp, Artificial Sequence
  source: /note="Description of Artificial Sequence: Synthetic polynucleotide"
gcctccctcgcgccatcaggtagacacactatgaccctgcccttctcatggaaccctctgctggcctcccacgtaccccacattctggcctgacccctcagaagccagaccactgtcggcctgggaagtccaactgtcgacgtagacacactatgactcatgtacagccatacacagccatgtcctcagttctctgactgttcatttgcagatacagagagttcttagcattgtctttggagatggagaatctgcccttcacagagtctgcatggtgtatctgacttccatcatcttttatatctattactcactccagccccttgcctgcagactggtgaactgggctcattcagaagctactgaaggcgaatctagaggctacacaggagagtctcaggaacttcccaggttgtctcaggtcctctgtgggctctatcagctccacctcacactgaacgtagacacactatgacctgagcgggctggcaaggc

SEQ ID NO: 2893 - DNA, 495 bp, Artificial Sequence
  source: /note="Description of Artificial Sequence: Synthetic polynucleotide"
gcctccctcgcgccatcaggtagacacatggtcaacctgcccttctcatggaaccctctgctggcctcccacgtaccccacattctggcctgacccctcagaagccagaccactgtcggcctgggaagtccaactgtcgacgtagacacatggtcaatcacatacagtaacacacagctgtgcccgctgctctcagactgttcattagcaaatacagtgagttcttggcattttctttggagatggtgaatttgctcttcaaagattatgcataacatatctgacttccatcacactgtatatctactactcactccagccccttccctggagcctgggaaaccgagttccttcagtagctactgaaggttaatccagagtctgcacaggagagtctcagggatcccccaggttgtcttgggtcctctccggactccacgagctgtacctctcactagacgtagacacatggtcaactgagcgggctggcaaggc

SEQ ID NO: 2894 - DNA, 495 bp, Artificial Sequence
  source: /note="Description of Artificial Sequence: Synthetic polynucleotide"
gcctccctcgcgccatcaggtagacacgatggcttcctgcccttctcatggaaccctctgctggcctcccacgtaccccacattctggcctgacccctcagaagccagaccactgtcggcctgggaagtccaactgtcgacgtagacacgatggctttcatgtatagccatacacggccacgtcctcagctctctgagtgttcatttgcagatacagagagttcttagcattgtctttggagatggagaatctgcccttcacagagtctgcatggtgtatctgacttccatcatcttttatatctattactcactccagccccttgcctggagactggtgaactcggctcattcagaagctactgaaggcgaatctagaggctacacaggagagtctcaggaacttcccaggttgtctcaggtcctctatggactctatcagctccacctcacactgaacgtagacacgatggcttctgagcgggctggcaaggc

SEQ ID NO: 2895 - DNA, 495 bp, Artificial Sequence
  source: /note="Description of Artificial Sequence: Synthetic polynucleotide"
gcctccctcgcgccatcaggtagacacagcatatgcctgcccttctcatggaaccctctgctggcctcccacgtaccccacattctggcctgacccctcagaagccagaccactgtcggcctgggaagtccaactgtcgacgtagacacagcatatgtcacatacagtaacacacagctgtgccctctgctctcagactgttcatttgcaaatacagtgagttcttggcattttctttggagatggtgaatttgctcttcacagattgggcataacatatctgacttccatcacactgtatatctactactcactccagccccttccctggagcctgggaaaccgagctcattcagtagctactgaaggttaatccagagtctgcacaggagagtctcaaggatcccccaggttgtcttgggtcctctccggactccacgagctgtacctctcactagacgtagacacagcatatgctgagcgggctggcaaggc

SEQ ID NO: 2896 - DNA, 495 bp, Artificial Sequence
  source: /note="Description of Artificial Sequence: Synthetic polynucleotide"
gcctccctcgcgccatcaggtagacaccatatgctcctgcccttctcatggaaccctctgctggcctcccacgtaccccacattctggcctgacccctcagaagccagaccactgtcggcctgggaagtccaactgtcgacgtagacaccatatgcttcaagtaatacacagacctatcctcggctctgacgctgttcatttgcagatacagtgatttcttggcatcatctctggagagggtgaatcgacccttcacagagtctgcatagcttgtgctacctacacaacaactcataaatgagacctactccagccctttcccaggagcctgatggacccagctcatccagtacctaataaaggtactaaaggtgaatccagaggctgcaaaagaaagtctcagggacccccaggctataacaagcctcccaaagactccaccagctgcacctcacactggtagacaccatatgctctgagcgggctggcaaggc

SEQ ID NO: 2897 - DNA, 495 bp, Artificial Sequence
  source: /note="Description of Artificial Sequence: Synthetic polynucleotide"
gcctccctcgcgccatcaggtagacactcgtcgatcctgcccttctcatggaaccctctgctggcctcccacgtaccccacattctggcctgacccctcagaagccagaccactgtcggcctgggaagtccaactgtcgacgtagacactcgtcgattcaacacagccgagtcctcatctctcagactgttcatttgcaagtacagcatgttcttgccattgtctctagagatggtgaatctacccttcagtgtctgcatagtataggctaccaccactagcactaatgtatgagacccattccagcccctttcttgaagcccggtgggcccagttcatgtcattgcttctcaagatgaatccgcaggctgcacatgagagtctcaggacacccccaaccccaccacagctgtaccaagtctcccccagactctaccagctgcacctcatactgcacaccgtagacactcgtcgatctgagcgggctggcaaggc

SEQ ID NO: 2898 - DNA, 495 bp, Artificial Sequence
  source: /note="Description of Artificial Sequence: Synthetic polynucleotide"
gcctccctcgcgccatcaggtagacaccagtctgtcctgcccttctcatggaaccctctgctggcctcccacgtaccccacattctggcctgacccctcagaagccagaccactgtcggcctgggaagtccaactgtcgacgtagacaccagtctgttcaagtaatacatggccgtgtccttagctttcagactgtccatttgcagatagagcatgctcttagaattgtctcggagattgtgaatcggcccttcacagagtctgcatagtatttctgacttccatcattccagatatgtgccactcactccagccccttccctggagcctggcggacccagctcatgccatagctactaaaggagaatcctgaggctgcacaggagagtctcagggaccccccaggctggaccaagcctcccccagactccaccagctgcacctcacactggacacctgcgtagacaccagtctgtctgagcgggctggcaaggc

SEQ ID NO: 2899 - DNA, 495 bp, Artificial Sequence
  source: /note="Description of Artificial Sequence: Synthetic polynucleotide"
gcctccctcgcgccatcaggtagacacaacgcgtacctgcccttctcatggaaccctctgctggcctcccacgtaccccacattctggcctgacccctcagaagccagaccactgtcggcctgggaagtccaactgtcgacgtagacacaacgcgtatcagtacagtaatagatggccgtgtactcggttttcagggtattcacttgcagatacagtgtgttctttgaatcatctcttgagatggtgaacctgcctttcacagatgcagcgcattctgtcgtgtaactgttacgtttggttctaatacggccaacccactccagccctttcccagaagcctggcggatccagtgcattcagaagtcactgaaggtgaatctagaagctgcaaatgagagtctcggggacccacccaggctgtaccaagcctcccccagactccaccagctgcgcctcacggtagacacaacgcgtactgagcgggctggcaaggc

SEQ ID NO: 2900 - DNA, 495 bp, Artificial Sequence
  source: /note="Description of Artificial Sequence: Synthetic polynucleotide"
gcctccctcgcgccatcaggtagacacgtagttcgcctgcccttctcatggaaccctctgctggcctcccacgtaccccacattctggcctgacccctcagaagccagaccactgtcggcctgggaagtccaactgtcgacgtagacacgtagttcgtcaacaataatacacagccatgtcctcagctatcaggctgttcatttgaagatacaaggacttcttggcgttgtctctggagatggtgaatcggcccatcacggagtctgcatagtatgtatcaccaccagtaccaatagctgatacccactccggacccttccctggagcccggcgaacccagtgcagaacatagctactgaaggcgaatccagaggctgcacaggagggtctcagggaccccccaggctgtaccaagcctcccccagactccaccagctgatcctcacactggacacctgcgtagacacgtagttcgctgagcgggctggcaaggc

SEQ ID NO: 2901 - DNA, 495 bp, Artificial Sequence
  source: /note="Description of Artificial Sequence: Synthetic polynucleotide"
gcctccctcgcgccatcaggtagacaccgaactaccctgcccttctcatggaaccctctgctggcctcccacgtaccccacattctggcctgacccctcagaagccagaccactgtcggcctgggaagtccaactgtcgacgtagacaccgaactactcatgactcaataatacagagccatattctcagctctcagactgttcatttgcagatacaacctgtgcttggcattgtctttggagatggtgaatctgaccttcacagagtctgcatattatgtctgacttccatcgtacattatatctactactcactgcagcccctttcctggagcctggcagattcagctgatctagtagctacagaaggtggattcagaggatgcacggcagagtctcaggcacattcagcttgtgccaactctccccaagactccaccatctgcaccccacactagacgtagacaccgaactacctgagcgggctggcaaggc

SEQ ID NO: 2902 - DNA, 495 bp, Artificial Sequence
  source: /note="Description of Artificial Sequence: Synthetic polynucleotide"
gcctccctcgcgccatcaggtagacacttaacgtccctgcccttctcatggaaccctctgctggcctcccacgtaccccacattctggcctgacccctcagaagccagaccactgtcggcctgggaagtccaactgtcgacgtagacacttaacgtctcaacagtaatacacggtcatgtcctcagctctcaggctgttcacttgcagatagagggagttcttggcattgtctctggagatggtcaatcggcccttcacagagtctacatagtatttctcacttccgtcacactttatgtcggccacccactccagccccttctccggagcctggcagacccagtgcatccaggagctactgaaggtgaatccagaggctgcacaggagagtctcagggaccctccaggctgtaccaagcctcacccagactccaccagctgcacctcacactggacaccgtagacacttaacgtcctgagcgggctggcaaggc

SEQ ID NO: 2903 - DNA, 495 bp, Artificial Sequence
  source: /note="Description of Artificial Sequence: Synthetic polynucleotide"
gcctccctcgcgccatcaggtagacacagcaacctcctgcccttctcatggaaccctctgctggcctcccacgtaccccacattctggcctgacccctcagaagccagaccactgtcggcctgggaagtccaactgtcgacgtagacacagcaaccttcacatacagtaatacacggccgtgccctctgctctcagactgttcatttgcaaacagagtgagttcttggcattttctttggagatggtgaatctgctcttcacagattgtgcataacatagctgacttctatcctactatatatctactactcactccagccccttccctggagcctgggaatctgagctcattcagtagctactgaaggttaatccagagtctgcacaggagagtctcagggatcccccaagttgtctttggttttcttcagactccaccagctgtacctcacactggacgtagacacagcaacctctgagcgggctggcaaggc

SEQ ID NO: 2904 - DNA, 495 bp, Artificial Sequence
  source: /note="Description of Artificial Sequence: Synthetic polynucleotide"
gcctccctcgcgccatcaggtagacacttctcgagcctgcccttctcatggaaccctctgctggcctcccacgtaccccacattctggcctgacccctcagaagccagaccactgtcggcctgggaagtccaactgtcgacgtagacacttctcgagtcaacagtaatacacagccttgtccttggctttcaggttggtcattgtaaggtagactgcacatgaaaaggtgtcgcttgggactgttaatttatttgtactcatggagagtaactctgagaactcccacttgatcactcactgtttccacccacaccaatccctgtcatgaagcctgctggaccaagctcatgctgtagccagtaaaggtgaaatcagaggctttgcaggagagtctcagtgaaccactgggctgtacaattttctgcctctgactccatcaataaacttcacacaggacttgtagacacttctcgagctgagcgggctggcaaggc

SEQ ID NO: 2905 - DNA, 495 bp, Artificial Sequence
  source: /note="Description of Artificial Sequence: Synthetic polynucleotide"
gcctccctcgcgccatcaggtagacacactctacgcctgcccttctcatggaaccctctgctggcctcccacgtaccccacattctggcctgacccctcagaagccagaccactgtcggcctgggaagtccaactgtcgacgtagacacactctacgtcaacacagtaatacacagccatgtcgtcggctctcaggctgttcatttgcagatacagtgaattctgggcattgtctctagagatggtgaatcagcccttcacagagtctgtgtagagtacggtatcaccacttgtactaataactgagacccactccaaaccctttcctggagcctggtggacccagtgcatagcagagctactgaaggtgaatccagaggctgcacaggagagtctcagagaccctcccagtctttactaagcctcccccagactccaccagctgcacctcacactggacgtagacacactctacgctgagcgggctggcaaggc

SEQ ID NO: 2906 - DNA, 495 bp, Artificial Sequence
  source: /note="Description of Artificial Sequence: Synthetic polynucleotide"
gcctccctcgcgccatcaggtagacactaccggaacctgcccttctcatggaaccctctgctggcctcccacgtaccccacattctggcctgacccctcagaagccagaccactgtcggcctgggaagtccaactgtcgacgtagacactaccggaatcaacagtagtacacaactgtgccctcggctctcaggctgttcatttgcagagacagtgaattctgggcattgtctctggagatggtgaatcggcccttcacagagtctgtgtagagtacggtatcaccacttgtactaataactgagacccactacaaaccctttcttggagcctggcggacccagtgcatagcagagctactgaaggtgaatccagaggctgcacaggagagtctcagggaccccccaggctggaccaagccttccccagactccaccagctgcacctcacactggacaccgtagacactaccggaactgagcgggctggcaaggc

SEQ ID NO: 2907 - DNA, 495 bp, Artificial Sequence
  source: /note="Description of Artificial Sequence: Synthetic polynucleotide"
gcctccctcgcgccatcaggtagacaccgaattgccctgcccttctcatggaaccctctgctggcctcccacgtaccccacattctggcctgacccctcagaagccagaccactgtcggcctgggaagtccaactgtcgacgtagacaccgaattgctcatgtacagccatgcatggtcatgtcctcagctctcagactgttcgtttggagatacggtgagttcttagcattgtctttggagatggtgaatctgcccttcacagagtctgcatggtatatctgacttccatcatattttacatctattactccctccagccccttccctagagtctcattgacccagctcattcagtagctactgaaggtgaatccagaggctacacaggagagtctcaggaacttcccaagttgtctcaggccctctatggactctatcagctccacctcacactgaacgtagacaccgaattgcctgagcgggctggcaaggc

SEQ ID NO: 2908 - DNA, 495 bp, Artificial Sequence
  source: /note="Description of Artificial Sequence: Synthetic polynucleotide"
gcctccctcgcgccatcaggtagacacttcgctcacctgcccttctcatggaaccctctgctggcctcccacgtaccccacattctggcctgacccctcagaagccagaccactgtcggcctgggaagtccaactgtcgacgtagacacttcgctcatcagtatagtaatacacggccgtgtcctcggttttcaggctgttcatttgcagataggcgatgcttttggaatcatcgcttgagatggtgaatctgcctttcacagacgcggcgtattctgttgttccacgattagttttgtttttagtgaaacctacccactccagcccctttcctggagcccggcagatccactgcatgcagtagttaacggaaggtgaatccagaggctgcacaggagagtctcagggaccccccaggctgtaccaagcctcccccagactccaccagctgcacctcacagtagacacttcgctcactgagcgggctggcaaggc

SEQ ID NO: 2909 - DNA, 495 bp, Artificial Sequence
  source: /note="Description of Artificial Sequence: Synthetic polynucleotide"
gcctccctcgcgccatcaggtagacacgacgttaacctgcccttctcatggaaccctctgctggcctcccacgtaccccacattctggcctgacccctcagaagccagaccactgtcggcctgggaagtccaactgtcgacgtagacacgacgttaatcaacagtaatacacggccgtgtcctcggctctcaggctgttcatttgcagataggtgatgcttttggaatcatctcttgagattgtgaatctgcctttcacagacgtggtctattctgttgtcccaccattagctttgtttctaatgaaacctacccactccagccccttcccgggagcctggcggacccagctcatgtagtagtcactgaaggtgaatccagaggctgcacaggagagtctcagggaccccccaggctggaccaagcctcccccggactccaccagctgcacctcacactggtagacacgacgttaactgagcgggctggcaaggc

SEQ ID NO: 2910 - DNA, 495 bp, Artificial Sequence
  source: /note="Description of Artificial Sequence: Synthetic polynucleotide"
gcctccctcgcgccatcaggtagacaccgtagagtcctgcccttctcatggaaccctctgctggcctcccacgtaccccacattctggcctgacccctcagaagccagaccactgtcggcctgggaagtccaactgtcgacgtagacaccgtagagttcacacagtaatacgtggctgtgtactcagctctcaaactgttcatttccagataagagtgtgttcttggcattgtttctggagatggggaatcagaacttcccagaatgtgcatagcgtatgctactcccatcagtactaatacatgagacccactccagtctgttccctggagcctggcaggcccagtgcatccagtggctactgaaggcaaatccagaggctgcacaggacagtctcagggacccccacccccaccgcgccaggctgtaccaagtctcccccaggctccaacaactgcgcgtagacaccgtagagtctgagcgggctggcaaggc

SEQ ID NO: 2911 - DNA, 495 bp, Artificial Sequence
  source: /note="Description of Artificial Sequence: Synthetic polynucleotide"
gcctccctcgcgccatcaggtagacacttccggtacctgcccttctcatggaaccctctgctggcctcccacgtaccccacattctggcctgacccctcagaagccagaccactgtcggcctgggaagtccaactgtcgacgtagacacttccggtatcacagtaatagacggccatggtgtcagcaatgaaactgtttatttgcagatacagtgagttcttggtgttttctctggagatggtcaaccggcccttcacagagtctgagtagtatatgcctccaccactagcattaatgtaagacccactccagtcccttccctggagcttggtccacctagtgcatgccatagttactgaaagtgtatccagaggctgcacaggagagtcacatggaccccccaagctgtaccaagcctcccccagactctaccagctacacttcacattggacacctgcgtagacacttccggtactgagcgggctggcaaggc

SEQ ID NO: 2912 - DNA, 495 bp, Artificial Sequence
  source: /note="Description of Artificial Sequence: Synthetic polynucleotide"
gcctccctcgcgccatcaggtagacacgcaattcgcctgcccttctcatggaaccctctgctggcctcccacgtaccccacattctggcctgacccctcagaagccagaccactgtcggcctgggaagtccaactgtcgacgtagacacgcaattcgtcacatacagtaacacacagctgtgccctctgctctcagactgttcatttgcaaatacagtgagttcttggcattttctttggagacggtgaatctgctcgtcacagattgtgcataacatatctgacttccatcacactgtatatctactactcactccagccccttccctggagcctgggaaaccgagctcattcagtagctactgaaggttaatccagaggctgcacaggagagtctcagggaacccaggttgtcttgggtcctctccagactccaccagctgtacctcacactggacacgtagacacgcaattcgctgagcgggctggcaaggc

SEQ ID NO: 2913 - DNA, 495 bp, Artificial Sequence
  source: /note="Description of Artificial Sequence: Synthetic polynucleotide"
gcctccctcgcgccatcaggtagacactgagcgaacctgcccttctcatggaaccctctgctggcctcccacgtaccccacattctggcctgacccctcagaagccagaccactgtcggcctgggaagtccaactgtcgacgtagacactgagcgaatcaacagtaatacacagccgtgtcctcggctctcaggctgttcatttgcagatacagtgagttcttggcgttgtctctggagatggtgaatcggcccttcacagagtctgcgtagtatatggtactactactactaatggatgagacccactccagccccttccctggagcctggcggacccagttcatgtagtagtcactgaaggtgaatccagaggctgcacaggagagtctcagggaccccccaggctttaccaagcctcccccagactccaccagctgcacctcacactggacacctgcgtagacactgagcgaactgagcgggctggcaaggc

SEQ ID NO: 2914 - DNA, 495 bp, Artificial Sequence
  source: /note="Description of Artificial Sequence: Synthetic polynucleotide"
gcctccctcgcgccatcaggtagacactactaagccctgcccttctcatggaaccctctgctggcctcccacgtaccccacattctggcctgacccctcagaagccagaccactgtcggcctgggaagtccaactgtcgacgtagacactactaagctcaacagtaatacacggccgtgtccgcggcggtcacagagctcagcttcaggtagaactggttcttggacgtgtctacggacatggtgattcgactcttgagggacgggttgtagtaggtgctcccactatgatggatttccccaatccactccagccccttccctgggggctggcggacccagattcaccagttaccactgctgatggagtcaccagagacagcgcagatgagggacagggtctccgaaggcttcaccagtcctgggcccgactcctgcagctgcacctgggacaggaccccgtagacactactaagcctgagcgggctggcaaggc

SEQ ID NO: 2915 - DNA, 495 bp, Artificial Sequence
  source: /note="Description of Artificial Sequence: Synthetic polynucleotide"
gcctccctcgcgccatcaggtagacactggcgtatcctgcccttctcatggaaccctctgctggcctcccacgtaccccacattctggcctgacccctcagaagccagaccactgtcggcctgggaagtccaactgtcgacgtagacactggcgtattcactgcgcccgccccctccgcctccctgcggtcacagagctcagcttcagggaaaactggttcttggacgtttctattgacatggtgactcaactcctgagggacggggtgtagtagctcctcccactataatagatgtatccaatccattccagccccttccctggggactggcggaccagctccaccagttaccactgctgatggagtcaccagagacagcgcatgtgagggacagggtctccgaagcttcaccagtcctgggccccactcctgcagctgcactgggacaggacccctgtgtagacactggcgtatctgagcgggctggcaaggc

SEQ ID NO: 2916 - DNA, 495 bp, Artificial Sequence
  source: /note="Description of Artificial Sequence: Synthetic polynucleotide"
gcctccctcgcgccatcaggtagacacgataaccacctgcccttctcatggaaccctctgctggcctcccacgtaccccacattctggcctgacccctcagaagccagaccactgtcggcctgggaagtccaactgtcgacgtagacacgataaccatcattagatggtccctctcacacaataatacatggcggcgtccgaggccttcaggctgctccactgcaggtaggcggtgctgctggagctgtcggctgagatggtgacgtggccttggaaggatgggctgtatctggtatcagagttcccaggatagatgctccccatccactccagttctttcccgggcatctggcgcacccagtggatccagtagctggtaaagctgtatccagaagtcttacaggagatcctcagagactccccgggtcttttcacctctgctgcagactgcaacagctggtagacacgataaccactgagcgggctggcaaggc

SEQ ID NO: 2917 - DNA, 495 bp, Artificial Sequence
  source: /note="Description of Artificial Sequence: Synthetic polynucleotide"
gcctccctcgcgccatcaggtagacacctagtgaacctgcccttctcatggaaccctctgctggcctcccacgtaccccacattctggcctgacccctcagaagccagaccactgtcggcctgggaagtccaactgtcgacgtagacacctagtgaatcagcacgtgtcctcagcctttaggctgctgatatgaagatatgccatgctgacggaggtgtccatggagaagacaaaccgtcctgtgaagccctgggcatacgttaggttcccagtgttggtgttgatccatcccatttcctcaagcccttgtccatgggcctgtcatacccagctgatagcatagcttgtgaaggtgtatccagaagccttgcaggaaaccttcaatgaggctccaggcttcttcacctcaggcccagactgcaccagctgcacctgtgagtggacacctgtggagaggaggtagacacctagtgaactgagcgggctggcaaggc

SEQ ID NO: 2918 - DNA, 495 bp, Artificial Sequence
  source: /note="Description of Artificial Sequence: Synthetic polynucleotide"
gcctccctcgcgccatcaggtagacacacgttcaccctgcccttctcatggaaccctctgctggcctcccacgtaccccacattctggcctgacccctcagaagccagaccactgtcggcctgggaagtccaactgtcgacgtagacacacgttcactcaacagtaatactcggccgtgtcctcagcctttaggctgctgatctgaagacacgccgtgctgacagacgtgtccatggagaagacaaaccatcctgtgaagccgtgggtatacgttgggttcccagtgtaggtgatgatccatcacatccactcaaagccctgtccaggggtctatcatacccaattcataccatagatggtgaaggtgtaaccagaagacttataggagaccttcactgaggccccaggcttcttcacctcaggcccagactgcaccagctgcagggagtgggcacctgtgtagacacacgttcacctgagcgggctggcaaggc

SEQ ID NO: 2919 - DNA, 448 bp, Artificial Sequence
  source: /note="Description of Artificial Sequence: Synthetic polynucleotide"
gcctccctcgcgccatcaggtagacacattacgctcctgcccttctcatggaaccctctgctggcctcccacgtaccccacattctggcctgacccctcagaagccagaccactgtcggcctgggaagtccaactgtcgacgtagacacattacgcttcatctctcatacagtcatacacggccgtgtcctcagcctttaggctgctgatcttcagatacgccatgctgacagaggtgtccatggagaatagaaaccgtcctgtgaagccgttggtatatgttgggttcccagtgtaggtgatgatccatcccatccactcaagcccttgtccaggggctggtcacactgaattcataccatactggctgcatagtattccatgatttacatatatcatattttatctaatcagtagacacattacgctctgagcgggctggcaaggc

SEQ ID NO: 2920 - DNA, 495 bp, Artificial Sequence
  source: /note="Description of Artificial Sequence: Synthetic polynucleotide"
gcctccctcgcgccatcaggtagacaccattgagtcctgcccttctcatggaaccctctgctggcctcccacgtaccccacattctggcctgacccctcagaagccagaccactgtcggcctgggaagtccaactgtcgacgtagacaccattgagttcaacacagtaataaatggctgcatcctcagtctttaggcagctagtctgcagatccgccgtgctgacagaggtgtccatggagaagacaaaccgtgtgtgaatctgtgggcatacattgggttcaccagggtaggatgatccatcccatccactcaagcccctgtcctggggtctgtcgtatccaattcataccataggtgatgacagtttaaccagacaccttgcaggagaccttcgccgaggccccaggctgcttcacctcaggcccagactgcaccagctgcactcgggagtgggcaccgtagacaccattgagtctgagcgggctggcaaggc

SEQ ID NO: 2921 - DNA, 300 bp, Artificial Sequence; identical to SEQ ID NO: 1749
  source: /note="Description of Artificial Sequence: Synthetic polynucleotide"

SEQ ID NO: 2922 - DNA, 300 bp, Artificial Sequence
  source: /note="Description of Artificial Sequence: Synthetic polynucleotide"
tctcacaggactcacagaacctgaagtcacccagactcccagccatcaggtcacacagatgggacaggaagtgatcttgcgctgtgtccccatctctaatcacttatacttctattggtacagacaaatcttggggcagaaagtcgagtttctggtttccttttataataatgaaatctcagagaagtctgaaatattcgatgatcaattctcagttgaaaggcctgatggatcaaatttcactctgaagatccggtccacaaagctggaggactcagccatgtacttctgtgccagcag

SEQ ID NO: 2923 - DNA, 300 bp, Artificial Sequence
  source: /note="Description of Artificial Sequence: Synthetic polynucleotide"
ttcctttgcaggtcccttggacacagctgtttcccagactccaaaatacctggtcacacagatgggaaacgacaagtccattaaatgtgaacaaaatctgggccatgatactatgtattggtataaacaggactctaagaaatttctgaagataatgtttagctacaataataaggagctcattataaatgaaacagttccaaatcgcttctcacctaaatctccagacaaagctcacttaaatcttcacatcaattccctggagcttggtgactctgctgtgtatttctgtgccagcag

SEQ ID NO: 2924 - DNA, 300 bp, Artificial Sequence
  source: /note="Description of Artificial Sequence: Synthetic polynucleotide"
ttcctttacagatccactggacacagccgtttcccagactccaaaatacctggtcacacagatgggaaaaaaggagtctcttaaatgagaacaaaatctgggccataatgctatgtattggtataaacaggactctaagaaatttctgaagacaatgtttatctacagtaacaaggagccaattttaaatgaaacagttccaaatcgcttctcacctgactctccagacaaagctcatttaaatcttcacatcaattccctggagcttggtgactctgctgtgtatttctgtgccagcag

SEQ ID NO: 2925 - DNA, 300 bp, Artificial Sequence
  source: /note="Description of Artificial Sequence: Synthetic polynucleotide"
tcctcctacagttcccatagacactgaagttacccagacaccaaaacacctggtcatgggaatgacaaataagaagtctttgaaatgtgaacaacatatggggcacagggctatgtattggtacaagcagaaagctaagaagccaccggagctcatgtttgtctacagctatgagaaactctctataaatgaaagtgtgccaagtcgcttctcacctgaatgccccaacagctctctcttaaaccttcacctacacgccctgcagccagaagactcagccctgtatctctgcgccagcag

SEQ ID NO: 2926 - DNA, 300 bp, Artificial Sequence
  source: /note="Description of Artificial Sequence: Synthetic polynucleotide"
tccccccgcagtccccatggaaacgggagttacgcagacaccaagacacctggtcatgggaatgacaaataagaagtctttgaaatgtgaacaacatctggggcataacgctatgtattggtacaagcaaagtgctaagaagccactggagctcatgtttgtctacaactttaaagaacagactgaaaacaacagtgtgccaagtcgcttctcacctgaatgccccaacagctctcacttattccttcacctacacaccctgcagccagaagactcggccctgtatctctgtgccagcag

SEQ ID NO: 2927 - DNA, 300 bp, Artificial Sequence
  source: /note="Description of Artificial Sequence: Synthetic polynucleotide"
tccccccacagtccccatggaaacgggagttacgcagacaccaagacacctggtcatgggaatgacaaataagaagtctttgaaatgtgaacaacatctgggtcataacgctatgtattggtacaagcaaagtgctaagaagccactggagctcatgtttgtctacagtcttgaagaacgggttgaaaacaacagtgtgccaagtcgcttctcacctgaatgccccaacagctctcacttattccttcacctacacaccctgcagccagaagactcggccctgtatctctgcgccagcag

SEQ ID NO: 2928 - DNA, 300 bp, Artificial Sequence
  source: /note="Description of Artificial Sequence: Synthetic polynucleotide"
cttttcccacaggcccagtaaaggctggagtcactcaaactccaagatatctgatcaaaacgagaggacagcaagtgacactgagctgctcccctatctctgggcataggagtgtatcctggtaccaacagaccccaggacagggccttcagttcctctttgaatacttcagtgagacacagagaaacaaaggaaacttccctggtcgattctcagggcgccagttctctaactctcgctctgagatgaatgtgagcaccttggagctgggggactcggccctttatctttgcgccagca

SEQ ID NO: 2929 - DNA, 300 bp, Artificial Sequence
  source: /note="Description of Artificial Sequence: Synthetic polynucleotide"
ttctccacctattttttcctcaggcccagtggaggctggaatcacccaagctccaagacacctgatcaaaacaagagaccagcaagtgacactgagatgctcccctgcctctgggcataactgtgtgtcctggtacctacgaactccaagtcagcccctctagttattgttacaatattgtaataggttacaaagagcaaaaggaaacttgcctaattgattctcagctcaccacgtccataactattactgagtcaaacacggagctaggggactcagccctgtatctctgtgccagca

SEQ ID NO: 2930 - DNA, 300 bp, Artificial Sequence
  source: /note="Description of Artificial Sequence: Synthetic polynucleotide"
cttttcccacaggcccagtggaggctggagtcacccaaagtcccacacacctgatcaaaacgagaggacagcaagtgactctgagatgctctcctatctctgggcacagcagtgtgtcctggtaccaacaggccccgggtcaggggccccagtttatctttgaatatgctaatgagttaaggagatcagaaggaaacttccctaatcgattctcagggcgccagttccatgactgttgctctgagatgaatgtgagtgccttggagctgggggactcggccctgtatctctgtgccagaa

SEQ ID NO: 2931 - DNA, 300 bp, Artificial Sequence
  source: /note="Description of Artificial Sequence: Synthetic polynucleotide"
cttttcccacaggctcagtggagactggagtcacccaaagtcccacacacctgatcaaaacgagaggacagcaagtgactctgagatgctcttctcagtctgggcacaacactgtgtcctggtaccaacaggccctgggtcaggggccccagtttatctttcagtattatagggaggaagagaatggcagaggaaacttccctcctagattctcaggtctccagttccctaattatagctctgagctgaatgtgaacgccttggagctggacgactcggccctgtatctctgtgccagca

SEQ ID NO: 2932 - DNA, 300 bp, Artificial Sequence
  source: /note="Description of Artificial Sequence: Synthetic polynucleotide"
cttttcccacaggcccagtggacgctggagtcacccaaagtcccacacacctgatcaaaacgagaggacagcaagtgactctgagatgctctcctatctctgggcacaagagtgtgtcctggtaccaacaggtcctgggtcaggggccccagtttatctttcagtattatgagaaagaagagagaggaagaggaaacttccctgatcgattctcagctcgccagttccctaactatagctctgagctgaatgtgaacgccttgttgctgggggactcggccctgtatctctgtgccagca

SEQ ID NO: 2933 - DNA, 300 bp, Artificial Sequence
  source: /note="Description of Artificial Sequence: Synthetic polynucleotide"
cttttcccacaggcttagtggacgctggagtcacccaaagtcccacacacctgatcaaaacgagaggacagcaagtgactctgagatgctctcctaagtctgggcatgacactgtgtcctggtaccaacaggccctgggtcaggggccccagtttatctttcagtattatgaggaggaagagagacagagaggcaacttccctgatcgattctcaggtcaccagttccctaactatagctctgagctgaatgtgaacgccttgttgctgggggactcggccctctatctctgtgccagca

SEQ ID NO: 2934 - DNA, 300 bp, Artificial Sequence
  source: /note="Description of Artificial Sequence: Synthetic polynucleotide"
cttttcccacaggcccagtggacgctggagtcacccaaagtcccacacacctgatcaaaacgagaggacagcacgtgactctgagatgctctcctatctctgggcacaccagtgtgtcctcgtaccaacaggccctgggtcaggggccccagtttatctttcagtattatgagaaagaagagagaggaagaggaaacttccctgatcaattctcaggtcaccagttccctaactatagctctgagctgaatgtgaacgccttgttgctaggggactcggccctctatctctgtgccagca

SEQ ID NO: 2935 - DNA, 300 bp, Artificial Sequence
  source: /note="Description of Artificial Sequence: Synthetic polynucleotide"
cttttcctgcaggcccagtggaggctggagtcacacaaagtcccacacacctgatcaaaacgagaggacagcaagcgactctgagatgctctcctatctctgggcacaccagtgtgtactggtaccaacaggccctgggtctgggcctccagttcctcctttggtatgacgagggtgaagagagaaacagaggaaacttccctcctagattttcaggtcgccagttccctaattatagctctgagctgaatgtgaacgccttggagctggaggactcggccctgtatctctgtgccagca

SEQ ID NO: 2936 - DNA, 300 bp, Artificial Sequence
  source: /note="Description of Artificial Sequence: Synthetic polynucleotide"
cttctctgcaggtccagtgaatgctggtgtcactcagaccccaaaattccaggtcctgaagacaggacagagcatgacactgcagtgtgcccaggatatgaaccataactccatgtactggtatcgacaagacccaggcatgggactgaggctgatttattactcagcttctgagggtaccactgacaaaggagaagtccccaatggctacaatgtctccagattaaacaaacgggagttctcgctcaggctggagtcggctgctccctcccagacatctgtgtacttctgtgccagcag

SEQ ID NO: 2937 - DNA, 300 bp, Artificial Sequence
  source: /note="Description of Artificial Sequence: Synthetic polynucleotide"
cttctctgcaggtccagtgaatgctggtgtcactcagaccccaaaattccgggtcctgaagacaggacagagcatgacactgctgtgtgcccaggatatgaaccatgaatacatgtactggtatcgacaagacccaggcatggggctgaggctgattcattactcagttggtgagggtacaactgccaaaggagaggtccctgatggctacaatgtctccagattaaaaaaacagaatttcctgctggggttggagtcggctgctccctcccaaacatctgtgtacttctgtgccagcag

SEQ ID NO: 2938 - DNA, 300 bp, Artificial Sequence; identical to SEQ ID NO: 2937
  source: /note="Description of Artificial Sequence: Synthetic polynucleotide"

SEQ ID NO: 2939 - DNA, 300 bp, Artificial Sequence
  source: /note="Description of Artificial Sequence: Synthetic polynucleotide"
cttctctgtaggtccagtgattgctgggatcacccaggcaccaacatctcagatcctggcagcaggacggcgcatgacactgagatgtacccaggatatgagacataatgccatgtactggtatagacaagatctaggactggggctaaggctcatccattattcaaatactgcaggtaccactggcaaaggagaagtccctgatggttatagtgtctccagagcaaacacagatgatttccccctcacgttggcgtctgctgtaccctctcagacatctgtgtacttctgtgccagcag

SEQ ID NO: 2940 - DNA, 300 bp, Artificial Sequence
  source: /note="Description of Artificial Sequence: Synthetic polynucleotide"
cttctctgcaggtccagtgaatgctggtgtcactcagaccccaaaattccaggtcctgaagacaggacagagcatgacactgcagtgtgcccaggatatgaaccatgaatacatgtcctggtatcgacaagacccaggcatggggctgaggctgattcattactcagttggtgctggtatcactgaccaaggagaagtccccaatggctacaatgtctccagatcaaccacagaggatttcccgctcaggctgctgtcggctgctccctcccagacatctgtgtacttctgtgccagcag

SEQ ID NO: 2941 - DNA, 300 bp, Artificial Sequence
  source: /note="Description of Artificial Sequence: Synthetic polynucleotide"
cttctctgcaggtccagtgaatgctggtgtcactcagaccccaaaattccgcatcctgaagataggacagagcatgacactgcagtgtacccaggatatgaaccataactacatgtactggtatcgacaagacccaggcatggggctgaagctgatttattattcagttggtgctggtatcactgataaaggagaagtcccgaatggctacaacgtctccagatcaaccacagaggatttcccgctcaggctggagttggctgctccctcccagacatctgtgtacttctgtgccagcag

SEQ ID NO: 2942 - DNA, 300 bp, Artificial Sequence
  source: /note="Description of Artificial Sequence: Synthetic polynucleotide"
cttccctgcaggtccaatgaatgctggtgtcactcagaccccaaaattccacgtcctgaagacaggacagagcatgactctgctgtgtgcccaggatatgaaccatgaatacatgtatcggtatcgacaagacccaggcaaggggctgaggctgatttactactcagttgctgctgctctcactgacaaaggagaagttcccaatggctacaatgtctccagatcaaacacagaggatttccccctcaagctggagtcagctgctccctctcagacttctgtttacttctgtgccagcag

SEQ ID NO: 2943 - DNA, 300 bp, Artificial Sequence
  source: /note="Description of Artificial Sequence: Synthetic polynucleotide"
gttcttctctgcaggtcccgtgaatgctggtgtcactcagaccccaaaattccacatcctgaagacaggacagagcatgacactgcagtgtgcccaggatatgaaccatggatacatgtcctggtatcgacaagacccaggcatggggctgagactgatttactactcagctgctgctggtactactgacaaagaagtccccaatggctacaatgtctctagattaaacacagaggatttcccactcaggctggtgtcggctgctccctcccagacatctgtgtacttgtgtgccagcag

SEQ ID NO: 2944 - DNA, 300 bp, Artificial Sequence
  source: /note="Description of Artificial Sequence: Synthetic polynucleotide"
cttctctgcaggtccagtgaatgctggtgtcactcagaccccaaaattccacatcctgaagacaggacagagcatgacactgcagtgtgcccaggatatgaaccatggatacttgtcctggtatcgacaagacccaggcatggggctgaggcgcattcattactcagttgctgctggtatcactgacaaaggagaagtccccgatggctacaatgtatccagatcaaacacagaggatttcccgctcaggctggagtcagctgctccctcccagacatctgtatacttctgtgccagcag

SEQ ID NO: 2945 - DNA, 300 bp, Artificial Sequence
  source: /note="Description of Artificial Sequence: Synthetic polynucleotide"
ctccacagatcacacaggtgctggagtctcccagtccctgagacacaaggtagcaaagaagggaaaggatgtagctctcagatatgatccaatttcaggtcataatgccctttattggtaccgacagagcctggggcagggcctggagtttccaatttacttccaaggcaaggatgcagcagacaaatcggggcttccccgtgatcggttctctgcacagaggtctgagggatccatctccactctgaagttccagcgcacacagcagggggacttggctgtgtatctctgtgccagcag

SEQ ID NO: 2946 - DNA, 300 bp, Artificial Sequence
  source: /note="Description of Artificial Sequence: Synthetic polynucleotide"
ctccacagatcacacaggagctggagtctcccagtcccccagtaacaaggtcacagagaagggaaaggatgtagagctcaggtgtgatccaatttcaggtcatactgccctttactggtaccgacagagcctggggcagggcctggagtttttaatttacttccaaggcaacagtgcaccagacaaatcagggctgcccagtgatcgcttctctgcagagaggactgggggatccgtctccactctgacgatccagcgcacacagcaggaggactcggccgtgtatctctgtgccagcag

SEQ ID NO: 2947 - DNA, 300 bp, Artificial Sequence
  source: /note="Description of Artificial Sequence: Synthetic polynucleotide"
ctccgcagatcacacaggtgctggagtctcccagacccccagtaacaaggtcacagagaagggaaaatatgtagagctcaggtgtgatccaatttcaggtcatactgccctttactggtaccgacaaagcctggggcagggcccagagtttctaatttacttccaaggcacgggtgcggcagatgactcagggctgcccaacgatcggttctttgcagtcaggcctgagggatccgtctctactctgaagatccagcgcacagagcggggggactcagccgtgtatctctgtgccagcag

SEQ ID NO: 2948 - DNA, 300 bp, Artificial Sequence
  source: /note="Description of Artificial Sequence: Synthetic polynucleotide"
ttccacagatcacacaggtgctggagtctcccagtccccaaggtacaaagtcgcaaagaggggacgggatgtagctctcaggtgtgattcaatttcgggtcatgtaaccctttattggtaccgacagaccctggggcagggctcagaggttctgacttactcccagagtgatgctcaacgagacaaatcagggcggcccagtggtcggttctctgcagagaggcctgagagatccgtctccactctgaagatccagcgcacagagcagggggactcagctgtgtatctctgtgccagcag

SEQ ID NO: 2949 - DNA, 300 bp, Artificial Sequence
  source: /note="Description of Artificial Sequence: Synthetic polynucleotide"
tttccacagatcacacaggtgctggagtctcccagtccccaaggtacgaagtcacacagaggggacaggatgtagctcccaggtgtgatccaatttcgggtcaggtaaccctttattggtaccgacagaccctggggcagggccaagagtttctgacttccttccaggatgaaactcaacaagataaatcagggctgctcagtgatcaattctccacagagaggtctgaggatctttctccacctgaagatccagcgcacagagcaagggcgactcggctgtgtatctctgtgccagaag

SEQ ID NO: 2950 - DNA, 300 bp, Artificial Sequence
  source: /note="Description of Artificial Sequence: Synthetic polynucleotide"
ttccacagatcacacaggtgctggagtctcccagtctcccaggtacaaagtcacaaagaggggacaggatgtagctctcaggtgtgatccaatttcgggtcatgtatccctttattggtaccgacaggccctggggcagggcccagagtttctgacttacttcaattatgaagcccaacaagacaaatcagggctgcccaatgatcggttctctgcagagaggcctgagggatccatctccactctgacgatccagcgcacagagcagcgggactcggccatgtatcgctgtgccagcag

SEQ ID NO: 2951 - DNA, 300 bp, Artificial Sequence
  source: /note="Description of Artificial Sequence: Synthetic polynucleotide"
ttccacagatcacacaggtgctggagtctcccagtctcccaggtacaaagtcacaaagaggggacaggatgtaactctcaggtgtgatccaatttcgagtcatgcaaccctttattggtatcaacaggccctggggcagggcccagagtttctgacttacttcaattatgaagctcaaccagacaaatcagggctgcccagtgatcggttctctgcagagaggcctgagggatccatctccactctgacgattcagcgcacagagcagcgggactcagccatgtatcgctgtgccagcag

SEQ ID NO: 2952 - DNA, 300 bp, Artificial Sequence
  source: /note="Description of Artificial Sequence: Synthetic polynucleotide"
ttccacagatcacacaggtgctggagtctcccagtcccctaggtacaaagtcgcaaagagaggacaggatgtagctctcaggtgtgatccaatttcgggtcatgtatcccttttttggtaccaacaggccctggggcaggggccagagtttctgacttatttccagaatgaagctcaactagacaaatcggggctgcccagtgatcgcttctttgcagaaaggcctgagggatccgtctccactctgaagatccagcgcacacagcaggaggactccgccgtgtatctctgtgccagcag

SEQ ID NO: 2953 - DNA, 300 bp, Artificial Sequence
  source: /note="Description of Artificial Sequence: Synthetic polynucleotide"
ctccacagatcacgcagatactggagtctcccagaaccccagacacaagatcacaaagaggggacagaatgtaactttcaggtgtgatccaatttctgaacacaaccgcctttattggtaccgacagaccctggggcagggcccagagtttctgacttacttccagaatgaagctcaactagaaaaatcaaggctgctcagtgatcggttctctgcagagaggcctaagggatctttctccaccttggagatccagcgcacagagcagggggactcggccatgtatctctgtgccagcag

SEQ ID NO: 2954 - DNA, 300 bp, Artificial Sequence
  source: /note="Description of Artificial Sequence: Synthetic polynucleotide"
ctgcctgcctctcccacagcccccatggaggcagggatcagccagataccaagatatcacagacacacagggaaaaagatcatcctgaaatttgctcagattaggaaccattattcagtgttctgttatcaataagaccaagaataggggctgaggctgatccattattcaggtagtattggcagcatgaccaaaggcggtgccaaggaagggtacaatgtctctggaaacaaactcaagcattttccctcaaccctggagtctactagcaccagccagacctctgtacctctgtggcag

SEQ ID NO: 2955 - DNA, 300 bp, Artificial Sequence
  source: /note="Description of Artificial Sequence: Synthetic polynucleotide"
ttcactttctgtctgcctctccagcaggctctattgatgctgggatcacccagatgccaagatatcacattgtacagaagaaagagatgatcctggaatgtgctcaggttaggaacagtgttctgatatcgacaggacccaagacgggggctgaagcttatccactattcaggcagtggtcacagcaggaccaaagttgatgtcacagaggggtactgtgtttcttgaaacaagcttgagcatttccccaatcctggcatccaccagcaccagccagacctatctgtaccactgtggcag

SEQ ID NO: 2956 - DNA, 300 bp, Artificial Sequence
  source: /note="Description of Artificial Sequence: Synthetic polynucleotide"
tctgacacacaggcccagtggattctggagtcacacaaaccccaaagcacctgatcacagcaactggacagcgagtgacgctgagatgctcccctaggtctggagacctctctgtgtactggtaccaacagagcctggaccagggcctccagttcctcattcagtattataatggagaagagagagcaaaaggaaacattcttgaacgattctccgcacaacagttccctgacttgcactctgaactaaacctgagctctctggagctgggggactcagctttgtatttctgtgccagca

SEQ ID NO: 2957 - DNA, 300 bp, Artificial Sequence
  source: /note="Description of Artificial Sequence: Synthetic polynucleotide"
ctctattacaggacacagggatgctgaaatcacccagagcccaagacacaagatcacagagacaggaaggcaggtgaccttggcgtgtcaccagacttggaaccacaacaatatgttctggtatcgacaagacctgggacatgggctgaggctgatccattactcatatggtgttcaagacactaacaaaggagaagtctcagatggctacagtgtctctagatcaaacacagaggacctccccctcactctggagtctgctgcctcctcccagacatctgtatatttctgcgccagcag

SEQ ID NO: 2958 - DNA, 300 bp, Artificial Sequence
  source: /note="Description of Artificial Sequence: Synthetic polynucleotide"
ctctattacaggacacagggatgctggaatcacccagagcccaagatacaagatcacagagacaggaaggcaggtgaccttgatgtgtcaccagacttggagccacagctatatgttctggtatcgacaagacctgggacatgggctgaggctgatctattactcagcagctgctgatattacagataaaggagaagtccccgatggctatgttgtctccagatccaagacagagaatttccccctcactctggagtcagctacccgctcccagacatctgtgtatttctgcgccagcag

SEQ ID NO: 2959 - DNA, 300 bp, Artificial Sequence
  source: /note="Description of Artificial Sequence: Synthetic polynucleotide"
ttctattacaggacacatggatgctggaatcacccagagcccaagacacaaggtcacagagacaggaacaccagtgactctgagatgtcaccagactgagaaccaccgctatatgtactggtatcgacaagacccggggcatgggctgaggctgatccattactcatatggtgttaaagatactgacaaaggagaagtctcagatggctatagtgtctctagatcaaagacagaggatttcctcctcactctggagtccgctaccagctcccagacatctgtgtacttctgtgccatcag

SEQ ID NO: 2960 - DNA, 300 bp, Artificial Sequence
  source: /note="Description of Artificial Sequence: Synthetic polynucleotide"
cccaacagaactctcagaagctgaagttgcccagtcccccagatataagattacagagaaaagccaggctgtggctttttggtgtgatcctatttctggccatgctaccctttactggtaccggcagatcctgggacagggcccggagcttctggttcaatttcaggatgagagtgtagtagatgattcacagttgcctaaggatcgattttctgcagagaggctcaaaggagtagactccactctcaagatccagcctgcagagcttggggactcggccatgtatctctgtgccagcag

SEQ ID NO: 2961 - DNA, 300 bp, Artificial Sequence
  source: /note="Description of Artificial Sequence: Synthetic polynucleotide"
cttctcagaactcacagaagctggagttgcccagtctcccagatataagattatagagaaaaggcagagtgtggctttttggtgcaatcctatatctggccatgctaccctttactggtaccagcagatcctgggacagggcccaaagcttctgattcagtttcagaataacggtgtagtggatgattcacagttgcctaaggatcgattttctgcagagaggctcaaaggagtagactccactctcaagatccagcctgcaaagcttgaggactcggccgtgtatctctgtgccagcag

SEQ ID NO: 2962 - DNA, 300 bp, Artificial Sequence
  source: /note="Description of Artificial Sequence: Synthetic polynucleotide"
ccccacagaactcatagaagctggagtggttcagtctcccagatataagattatagagaaaaaacagcctgtggctttttggtgcaatcctatttctggccacaataccctttactggtacctgcagaacttgggacagggcccggagcttctgattcgatatgagaatgaggaagcagtagacgattcacagttgcctaaggatcgattttctgcagagaggctcaaaggagtagactccactctcaagatccagcctgcagagcttggggactcggccgtgtatctctgtgccagcag

SEQ ID NO: 2963 - DNA, 300 bp, Artificial Sequence
  source: /note="Description of Artificial Sequence: Synthetic polynucleotide"
ttttatagcacacacagatgctggtgttatccagtcacccaggcacaaagtgacagagatgggacaatcagtaactctgagatgcgaaccaatttcaggccacaatgatcttctctggtacagacagacctttgtgcagggactggaattgctgaattacttctgcagctggaccctcgtagatgactcaggagtgtccaaggattgattctcagcacagatgcctgatgtatcattctccactctgaggatccagcccatggaacccagggacttgggcctatatttctgtgccagcag

SEQ ID NO: 2964 - DNA, 300 bp, Artificial Sequence
  source: /note="Description of Artificial Sequence: Synthetic polynucleotide"
ttttatagcatgcacagatgctggcattatccagtcacccaagcatgaggtgacagaaatgggacaaacagtgactctgagatgtgagccaatttttggccacaatttccttttctggtacagagataccttcgtgcagggactggaattgctgagttacttccggagctgatctattatagataatgcaggtatgcccacagagcgattctcagctgagaggcctgatggatcattctctactctgaagatccagcctgcagagcagggggactcggccgtgtatgtctgtgcaagtcg

SEQ ID NO: 2965 - DNA, 300 bp, Artificial Sequence
  source: /note="Description of Artificial Sequence: Synthetic polynucleotide"
tttcatagagcatacagatgctggagttatccagtcaccccgccatgaggtgacagagatgggacaagaagtgactctgagatgtaaaccaatttcaggccacaactcccttttctggtacagacagaccatgatgcggggactggagttgctcatttactttaacaacaacgttccgatagatgattcagggatgcccgaggatcgattctcagctaagatgcctaatgcatcattctccactctgaagatccagccctcagaacccagggactcagctgtgtacttctgtgccagcag

SEQ ID NO: 2966 - DNA, 300 bp, Artificial Sequence
  source: /note="Description of Artificial Sequence: Synthetic polynucleotide"
cttcatagagcacacagatgctggagttatccagtcaccccggcacgaggtgacagagatgggacaagaagtgactctgagatgtaaaccaatttcaggacacgactaccttttctggtacagacagaccatgatgcggggactggagttgctcatttactttaacaacaacgttccgatagatgattcagggatgcccgaggatcgattctcagctaagatgcctaatgcatcattctccactctgaagatccagccctcagaacccagggactcagctgtgtacttctgtgccagcag

SEQ ID NO: 2967 - DNA, 300 bp, Artificial Sequence
  source: /note="Description of Artificial Sequence: Synthetic polynucleotide"
tttcacagagcttatagatgctagagtcacccagacaccaaggcacaaggtgacagagatgggacaagaagtaacaatgagatgtcagccaattttaggccacaatactgttttctggtacagacagaccatgatgcaaggactggagttgctggcttacttccgcaaccgggctcctctagatgattcggggatgccgaaggatcgattctcagcagagatgcctgatgcaactttagccactctgaagatccagccctcagaacccagggactcagctgtgtatttttgtgctagtgg

SEQ ID NO: 2968 - DNA, 300 bp, Artificial Sequence
  source: /note="Description of Artificial Sequence: Synthetic polynucleotide"
ttcctccacagtttcagtggctgctggagtcatccagtccccaagacatctgatcaaagaaaagagggaaacagccactctgaaatgctatcctatccctagacacgacactgtctactggtaccagcagggtccaggtcaggacccccagttcctcatttcgttttatgaaaagatgcagagcgataaaggaagcatccctgatcgattctcagctcaacagttcagtgactatcattctgaactgaacatgagctccttggagctgggggactcagccctgtacttctgtgccagcag

SEQ ID NO: 2969 - DNA, 300 bp, Artificial Sequence
  source: /note="Description of Artificial Sequence: Synthetic polynucleotide"
tcccacagagcacatagaagctggagttactcagttccccagccacagcgtaatagagaagggccagactgtgactctgagatgtgacccaatttctggacatgataatctttattggtatcgacgtgttatgggaaaagaaataaaatttctgttacattttgtgaaagagtctaaacaggatgagtccggtatgcccaacaatcgattcttagctgaaaggactggagggacgtattctactctgaaggtgcagcctgcagaactggaggattctggagtttatttctgtgccagcag

SEQ ID NO: 2970 - DNA, 300 bp, Artificial Sequence
  source: /note="Description of Artificial Sequence: Synthetic polynucleotide"
tttctctacaggtcatggggatgccatggtcatccagaacccaagataccaggttacccagtttggaaagccagtgaccctgagttgttctcagactttgaaccataacgtcatgtactggtaccagcagaagtcaagtcaggccccaaagctgctgttccactactatgacaaagattttaacaatgaagcagacacccctgataacttccaatccaggaggccgaacacttctttctgctttcttgacatccgctcaccaggcctgggggacacagccatgtacctgtgtgccaccag

SEQ ID NO: 2971 - DNA, 300 bp, Artificial Sequence
  source: /note="Description of Artificial Sequence: Synthetic polynucleotide"
ctttacaggttctcctggtgaagaagtcgcccagactccaaaacatcttgtcagaggggaaggacagaaagcaaaattatattgtgccccaataaaaggacacagttatgttttttggtaccaacaggtcctgaaaaacgagttcaagttcttgatttccttccagaatgaaaatgtctttgatgaaacaggtatgcccaaggaaagattttcagctaagtgcctcccaaattcaccctgtagccttgagatccaggctacgaagcttgaggattcagcagtgtatttttgtgccagcag

SEQ ID NO: 2972 - DNA, 300 bp, Artificial Sequence
  source: /note="Description of Artificial Sequence: Synthetic polynucleotide"
ttcttccacaggacactcggagcctggagtcagccagacccccagacacaaggtcaccaacatgggacaggaggtgattctgaggtgcgatccatcttctggtcacatgtttgttcactggtaccgacagaatctgaggcaagaaatgaagttgctgatttccttccagtaccaaaacattgcagttgattcagggatgcccaaggaacgattcacagctgaaagacctaacggaacgtcttccacgctgaagatccatcccgcagagccgagggactcagccgtgtatctctacagtag

SEQ ID NO: 2973 - DNA, 300 bp, Artificial Sequence
  source: /note="Description of Artificial Sequence: Synthetic polynucleotide"
cctctgaggtctctcaaatgccggcgtcatgcagaacccaagacacctggtcaggaggaggggacaggaggcaagactgagatgcagcccaatgaaaggacacagtcatgtttactggtatcggcagctcccagaggaaggtctgaaattcatggtttatctccagaaagaaaatatcatagatgagtcaggaatgccaaaggaacgattttctgctgaatttcccaaagagggccccagcatcctgaggatccagcaggtagtgcgaggagattcggcagcttatttctgtgccagctc

SEQ ID NO: 2974 - DNA, 300 bp, Artificial Sequence
  source: /note="Description of Artificial Sequence: Synthetic polynucleotide"
ttcttttccagacaccgtggatggtggaatcactcagtccccaaagtacctgttcagaaaggaaggacagaatgtgaccctgagttgtgaacagaatttgaaccacgatgccatgtactggtaccgacaggacccagggcaagggctgagattgatctactactcacagatagtaaatgactttcagaaaggagatatagctgaagggtacagcgtctctcgggagaagaaggaatcctttcctctcactgtgacatcggcccaaaagaacccgacagctttctatctctgtgccagtag

SEQ ID NO: 2975 - DNA, 300 bp, Artificial Sequence
  source: /note="Description of Artificial Sequence: Synthetic polynucleotide"
aggctccgggcttggtgctgtcgtctctcaacatccgagctgggttatctgtaagagtggaacctctgtgaagatcgagtgccgttccctggactttcaggccacaactatgttttggtatcgtcagttcccgaaacagagtctcatgctgatggcaacttccaatgagggctccaaggccacatacgagcaaggcgtcgagaaggacaagtttctcatcaaccatgcaagcctgaccttgtccactctgacagtgaccagtgcccatcctgaagacagcagcttctacatctgcagtgc

SEQ ID NO: 2976 - DNA, 300 bp, Artificial Sequence
  source: /note="Description of Artificial Sequence: Synthetic polynucleotide"
ctccacaggctccacggacaccaaggtcacccagagacctagacttctggtcaaagcaagtgaacagaaagcaaagatggattgtgttcctataaaagcacatagttatgtttactggtatcgtaagaagctggaagaagagctcaagtttttggtttactttcagaatgaagaacttattcagaaagcagaaataatcaatgagcgatttttagcccaatgctccaaaaactcatcctgtaccttggagatccagtccacggagtcaggggacacagcactgtatttctgtgccagcag

SEQ ID NO: 2977 - DNA, 300 bp, Artificial Sequence
  source: /note="Description of Artificial Sequence: Synthetic polynucleotide"
ttgtctcttggacccttggatgctgacatctatcagatgccattccagctcactggggctggatgggatgtgactctggagtggaaacggaatttgagacacaatgacatgtactgctactggtactggcaggacccaaagcaaaatctgagactgatctattactcaagggttgaaaaggatattcagagaggagatctaactgaaggctacgtgtctgccaagaggagaaggggctatttcttctcagggtgaagttggcccacaccagccaaacagctttgtacttctgtcctggga

SEQ ID NO: 2978 - DNA, 300 bp, Artificial Sequence
  source: /note="Description of Artificial Sequence: Synthetic polynucleotide"
tcttacagactcttttcatgccaaagtcacacagactccaggacatttggtcaaaggaaaaggacagaaaacaaagatggattgtacccccgaaaaaggacatacttttgtttattggtatcaacagaatcagaataaagagtttatgcttttgatttcctttcagaatgaacaagttcttcaagaaacggagatgcacaagaagcgattctcatctcaatgccccaagaacgcaccctgcagcctggcaatcctgtcctcagaaccgggagacacggcactgtatctctgcgccagcag

SEQ ID NO: 2979 - DNA, 300 bp, Artificial Sequence
  source: /note="Description of Artificial Sequence: Synthetic polynucleotide"
atttccacagggtccatggatgctgatgttacccagaccccaaggaataggatcacaaagacaggaaagaggattatgctggaatgttctcagactaagggtcatgatagaatgtactggtatcgacaagacccaggactgggcctacggttgatctattactcctttgatgtcaaagatataaacaaaggagagatctctgatggatacagtgtctctcgacaggcacaggctaaattctccctgtccctagagtctgccatccccaaccagacagctctttacttctgtgccaccagt

SEQ ID NO: 2980 - DNA, 300 bp, Artificial Sequence
  source: /note="Description of Artificial Sequence: Synthetic polynucleotide"
tcttcccataggcctcatggaagctgacatctaccagaccccaagataccttgttatagggacaggaaagaagatcactctggaatgttctcaaaccatgggccatgacaaaatgtactggtatcaacaagatccaggaatggaactacacctcatccactattcctatggagttaattccacagagaagggagatctttcctctgagtcaacagtctccagaataaggacggagcattttcccctgaccctggagtctgccaggccctcacatacctctcagtacctctgtgccagcag

SEQ ID NO: 2981 - DNA, 300 bp, Artificial Sequence
  source: /note="Description of Artificial Sequence: Synthetic polynucleotide"
ccccccaacaggcctcaaggatgctgtagttacacaattcccaagacacagaatcattgggacaggaaaggaattcattctacagtgttcccagaatatgaatcatgttacaatgtactggtatcgacaggacccaggacttggactgaagctggtctattattcacctggcactgggagcactgaaaaaggagatatctctgaggggtatcatgtttcttgaaatactatagcatcttttcccctgaccctgaagtctgccagcaccaaccagacatctgtgtatctctatgccagcag

SEQ ID NO: 2982 - DNA, 300 bp, Artificial Sequence
  source: /note="Description of Artificial Sequence: Synthetic polynucleotide"
ttcctttacaggccccctggaagcccaagtgacccagaacccaagatacctcatcacagtgactggaaagaagttaacagtgacttgttctcagaatatgaaccatgagtatatgtcctggtatcgacaagacccagggctgggcttaaggcagatctactattcaatgaatgttgaggtgactgataagggagatgttcctgaagggtacaaagtctctcgaaaagagaagaggaatttccccctgatcctggagtcgcccagccccaaccagacctctctgtacttctgtgccagcag

SEQ ID NO: 2983 - DNA, 300 bp, Artificial Sequence
  source: /note="Description of Artificial Sequence: Synthetic polynucleotide"
gtctctcacaggcctcgtagatgtgaaagtaacccagagctcgagatatctagtcaaaaggacgggagagaaagtttttctggaatgtgtccaggatatggaccatgaaaatatgttctggtatcgacaagacccaggtctggggctacggctgatctatttctcatatgatgttaaaatgaaagaaaaaggagatattcctgaggggtacagtgtctctagagagaagaaggagcgcttctccctgattctggagtccgccagcaccaaccagacatctatgtacctctgtgccagcag

SEQ ID NO: 2984 - DNA, 300 bp, Artificial Sequence
  source: /note="Description of Artificial Sequence: Synthetic polynucleotide"
actaggctctgtgttcagtgctgtcatctctcaaaagccaagcagggatatctgtcaacgtggaacctccctgacgatccagtgtcaagtcgatagccaagtcaccatgatgttctggtaccgtcagcaacctggacagagcctgacactgatcgcaactgcaaatcagggctctgaggccacatatgagagtggatttgtcattgacaagtttcccatcagccgcccaaacctaacattctcaactctgactgtgagcaacatgagccctgaagacagcagcatatatctctgcagcgt

SEQ ID NO: 2985 - DNA, 300 bp, Artificial Sequence
  source: /note="Description of Artificial Sequence: Synthetic polynucleotide"
tatctttcccacaggggtcagatctcagactattcatcaatggccagcgaccctggtgcagcctgtgggcagcccgctctctctggagtgcactgtggagggaacatcaaaccccaacctatactggtaccgacaggctgcaggcaggggcctccagctgctcttctactccgttggtattggccagatcagctctgaggtgccccagaatctctcagcctccagaccccaggaccggcagttcatcctgagttctaagaagctccttctcagtgactctggcttctatctctgtgcctg

SEQ ID NO: 2986 - DNA, 300 bp, Artificial Sequence
  source: /note="Description of Artificial Sequence: Synthetic polynucleotide"
tctttctgtcttctgtcccctcagctcataaaccccagctcgtagaagctgaagccacctagactctaagacacctgattgcagagacaggaaaggagttctcaagataagtgccaagatttcatactggttttcacaagaatcagggttggaattagagccgactcattattcagttaacattgacattgttgattagagacatatccctattgaaaatatttcctggcaaaaaatagaagttctctttggctctgaaatctgcaactccctttcaggtgtccctgtgtccttgtaccg

SEQ ID NO: 2987 - DNA, 300 bp, Artificial Sequence
  source: /note="Description of Artificial Sequence: Synthetic polynucleotide"
cagaccctgagatgaggcaggaaagttgtatcggaatgttttcagactatcaaccagaccaaacgttctggaatccataagatccagggctggggataaatttaatctattaattattcttctgaagttggcagctttgaaaaagatgccctgagtcagcatagtcattctaaccaaaaagaaaaaagggaaaaaataatcatctttcccaacccttaaatcgtccagcactaaccagactctgagaccctctgcagcagcagcctatcagtgcagccacatcctctctgagcggatatg

SEQ ID NO: 2988 - DNA, 300 bp, Artificial Sequence; identical to SEQ ID NO: 1749
  source: /note="Description of Artificial Sequence: Synthetic polynucleotide"

SEQ ID NO: 2989 - DNA, 100 bp, Artificial Sequence; identical to SEQ ID NO: 1750
  source: /note="Description of Artificial Sequence: Synthetic polynucleotide"

SEQ ID NO: 2990 - DNA, 100 bp, Artificial Sequence
  source: /note="Description of Artificial Sequence: Synthetic polynucleotide"
tatggctacaccttcggttcggggaccaggttaaccgttgtaggtaaggctgggggtctctaggaggggtgcgatgagggaggactctgtcctgggaaat

SEQ ID NO: 2991 - DNA, 100 bp, Artificial Sequence
  source: /note="Description of Artificial Sequence: Synthetic polynucleotide"
gaaacaccatatattttggagagggaagttggctcactgttgtaggtgagtaagtcaaggctggacagctgggaacttgcaaaaaggggctggaatccag

SEQ ID NO: 2992 - DNA, 100 bp, Artificial Sequence
  source: /note="Description of Artificial Sequence: Synthetic polynucleotide"
aatgaaaaactgttttttggcagtggaacccagctctctgtcttgggtatgtaaaagacttctttcgggatagtgtatcataaggtcggagttccaggag

SEQ ID NO: 2993 - DNA, 100 bp, Artificial Sequence
  source: /note="Description of Artificial Sequence: Synthetic polynucleotide"
atcagccccagcattttggtgatgggactcgactctccatcctaggtaagttgcagaatcagggtggtatggccattgtcccttgaaggcagagttctct

SEQ ID NO: 2994 - DNA, 100 bp, Artificial Sequence
  source: /note="Description of Artificial Sequence: Synthetic polynucleotide"
ataattcacccctccactttgggaacgggaccaggctcactgtgacaggtatgggggctccactcttgactcgggggtgcctgggtttgactgcaatgat

SEQ ID NO: 2995 - DNA, 100 bp, Artificial Sequence
  source: /note="Description of Artificial Sequence: Synthetic polynucleotide"
acaatgagcagttcttcgggccagggacacggctcaccgtgctaggtaagaagggggctccaggtgggagagagggtgagcagcccagcctgcacgaccc

SEQ ID NO: 2996 - DNA, 100 bp, Artificial Sequence
  source: /note="Description of Artificial Sequence: Synthetic polynucleotide"
accggggagctgttttttggagaaggctctaggctgaccgtactgggtaaggaggcggttggggctccggagagctccgagagggcgggatgggcagagg

SEQ ID NO: 2997 - DNA, 100 bp, Artificial Sequence
  source: /note="Description of Artificial Sequence: Synthetic polynucleotide"
agatacgcagtattttggcccaggcacccggctgacagtgctcggtaagcgggggctcccgctgaagccccggaactggggagggggcgccccgggacgc

SEQ ID NO: 2998 - DNA, 100 bp, Artificial Sequence
  source: /note="Description of Artificial Sequence: Synthetic polynucleotide"
aaaacattcagtacttcggcgccgggacccggctctcagtgctgggtaagctggggccgccgggggaccggggacgagactgcgctcgggtttttgtgcg

SEQ ID NO: 2999 - DNA, 100 bp, Artificial Sequence
  source: /note="Description of Artificial Sequence: Synthetic polynucleotide"
gagacccagtacttcgggccaggcacgcggctcctggtgctcggtgagcgcgggctgctggggcgcgggcgcgggcggcttgggtctggtttttgcgggg

SEQ ID NO: 3000 - DNA, 100 bp, Artificial Sequence
  source: /note="Description of Artificial Sequence: Synthetic polynucleotide"
gggccaacgtcctgactttcggggccggcagcaggctgaccgtgctgggtgagttttcgcgggaccacccgggcggcgggattcaggtggaaggcggcgg

SEQ ID NO: 3001 - DNA, 100 bp, Artificial Sequence
  source: /note="Description of Artificial Sequence: Synthetic polynucleotide"
acgagcagtacttcgggccgggcaccaggctcacggtcacaggtgagattcgggcgtctccccaccttccagcccctcggtccccggagtcggagggtgg

SEQ ID NO: 3002 - DNA, 300 bp, Artificial Sequence
  source: /note="Description of Artificial Sequence: Synthetic polynucleotide"
agtcagatatcttccaacttggaagggagaacgaagtcagtcaccaggctgactgggtcatctgctgaaatcacctgtgatcttcctggagcaagtaccttatacatccactggtacctgcaccaggaggggaaggccccacagtgtcttctgtactatgaaccctactactccagggttgtgctggaatcaggaatcactccaggaaagtatgacactggaagcacaaggagcaattggaatttgagactgcaaaatctaattaaaaatgattctgggttctattactgtgccacctgg

SEQ ID NO: 3003 - DNA, 300 bp, Artificial Sequence
  source: /note="Description of Artificial Sequence: Synthetic polynucleotide"
cagaaatcttccaacttggaagggagaacgaagtcagtcatcaggcagactgggtcatctgctgaaatcacttgtgatcttgctgaaggaagtaacggctacatccactggtacctacaccaggaggggaaggccccacagcgtcttcagtactatgactcctacaactccaaggttgtgttggaatcaggagtcagtccagggaagtattatacttacgcaagcacaaggaacaacttgagattgatactgcgaaatctaattgaaaatgactttggggtctattactgtgccacctgg

SEQ ID NO: 3004 - DNA, 300 bp, Artificial Sequence
  source: /note="Description of Artificial Sequence: Synthetic polynucleotide"
cagaaatcttccaacttggaagggagaacgaagtcagtcaccaggcagactgggtcatctgctgaaatcacttgcgatcttactgtaacaaataccttctacatccactggtacctacaccaggaggggaaggccccacagcgtcttctgtactatgacgtctccaccgcaagggatgtgttggaatcaggactcagtccaggaaagtattatactcatacacccaggaggtggagctggatattgagactgcaaaatctaattgaaaatgattctggggtctattactgtgccacctgg

SEQ ID NO: 3005 - DNA, 300 bp, Artificial Sequence
  source: /note="Description of Artificial Sequence: Synthetic polynucleotide"
cagaaatcttccaacttggaagggagaacgaagtcagtcatcaggcagactgggtcatctgctgaaatcacttgtgatcttgctgaaggaagtaccggctacatccactggtacctacaccaggaggggaaggccccacagcgtcttctgtactatgactcctacacctccagcgttgtgttggaatcaggaatcagcccagggaagtatgatacttacggaagcacaaggaagaacttgagaatgatactgcgaaatcttattgaaaatgactctggagtctattactgtgccacctgg

SEQ ID NO: 3006 - DNA, 300 bp, Artificial Sequence
  source: /note="Description of Artificial Sequence: Synthetic polynucleotide"
cagaaatcttccaacttggaagggggaacgaagtcagtcacgaggccgactaggtcatctgctgaaatcacttgtgaccttactgtaataaatgccttctacatccactggtacctacaccaggaggggaaggccccacagcgtcttctgtactatgacgtctccaactcaaaggatgtgttggaatcaggactcagtccaggaaagtattatactcatacacccaggaggtggagctggatattgatactacgaaatctaattgaaaatgattctggggtctattactgtgccacctgg

SEQ ID NO: 3007 - DNA, 300 bp, Artificial Sequence
  source: /note="Description of Artificial Sequence: Synthetic polynucleotide"
cagaaatcttccaacttggaagggagaatgaagtcagtcaccaggccgactgggtcatctgctgaaatcacttgtgaccttactgtaataaatgccgtctacatccactggtacctacagcaggaggggaagaccccacagcatcttctgcactatgatgtctccaactcaagggatgtgttggaatcaggtctcagtcttggaaagtattatactcatacaccgaggaggtggagctggaatttgagactgcaaaatctaattgaaaatgattctggggtctattactgtgccacctgg

SEQ ID NO: 3008 - DNA, 300 bp, Artificial Sequence
  source: /note="Description of Artificial Sequence: Synthetic polynucleotide"
agtcagatatctactaacttggaagcgaaaataaagtcaggcaccaggcagatggggtcatctgctgtaatcacctgtgatcttcctgtagaaaatgccttctacatccactggtacctacgccaggaggggaaggccccacagcatcttctgtactatgacatctgcaactccagggatatgttggaatcaggagtcagtcaggaaagcatgatacttatggaagtagaaggataagctggaaatttatacctccaaaactaaatgaaaatgcctctggggtctattactgtgccacct

SEQ ID NO: 3009 - DNA, 300 bp, Artificial Sequence
  source: /note="Description of Artificial Sequence: Synthetic polynucleotide"
agtcagaaatcttccaacttgcaagggagaaggaagtcagtcaccaggccagctgggtcatctgctgtaatcacttgtgatcttactgtaataaataccttctacatccactggtacctgcaccaggcggggaaggccccacagcatcttccatactatgacccctactactccagggttgtgttggaatcaagaatcagtagaggaaagtattttacttatgcaagcatgaggaggagctggaaattgatactgcaaaatctaattgaaaatgattctggatctattactgtgccacct

SEQ ID NO: 3010 - DNA, 300 bp, Artificial Sequence
  source: /note="Description of Artificial Sequence: Synthetic polynucleotide"
cagaaatcttccaacttggaagggagaacaaagtcagtcaccaggccaactgggtcatcagctgtaatcacttgtgatcttcctgtagaaaatgccgtctacacccactggtacctacaccaggaggggaaggccccacagcgtcttctgtactatgactcctacaactccagggttgtgttggaatcaggaatcagtcgagaaaagtatcatacttatgcaagcacagggaagagccttaaatttatactggaaaatctaattgaacgtgactctggggtctattactgtgccacctgg

SEQ ID NO: 3011 - DNA, 300 bp, Artificial Sequence
  source: /note="Description of Artificial Sequence: Synthetic polynucleotide"
gcaggtcacctagagcaacctcaaatttccagtactaaaacgctgtcaaaaacagcccgcctggaatgtgtggtgtctggaataacaatttctgcaacatctgtatattggtatcgagagagacctggtgaagtcatacagttcctggtgtccatttcatatgacggcactgtcagaaaggaatccggcattccgtcaggcaaatttgaggtggataggatacctgaaacgtctacatccactctcaccattcacaatgtagagaaacaggacatagctacctactactgtgccttgtgg

SEQ ID NO: 3012 - DNA, 300 bp, Artificial Sequence
  source: /note="Description of Artificial Sequence: Synthetic polynucleotide"
ttatcaaaagtggagcagttccagctatccatttccacggaagtcaagaaaagtattgacataccttgcaagatatcgagcacaaggtttgaaacagatgtcattcactggtaccggcagaaaccaaatcaggctttggagcacctgatctatattgtctcaacaaaatccgcagctcgacgcagcatgggtaagacaagcaacaaagtggaggcaagaaagaattctcaaactctcacttcaatccttaccatcaagtccgtagagaaagaagacatggccgtttactactgtgctgcg

SEQ ID NO: 3013 - DNA, 300 bp, Artificial Sequence
  source: /note="Description of Artificial Sequence: Synthetic polynucleotide"
gggcagttggaacaacctgaaatatctatttccagaccagcaaataagagtgcccacatatcttggaaggcatccatccaaggctttagcagtaaaatcatacactggtactggcagaaaccaaacaaaggcttagaatatttattacatgtcttcttgacaatctctgctcaagattgctcaggtgggaagactaagaaacttgaggtaagtaaaaatgctcacacttccacttccactttgaaaataaagttcttagagaaagaagatgaggtggtgtaccactgtgcctgctggatt

SEQ ID NO: 3014 - DNA, 300 bp, Artificial Sequence
  source: /note="Description of Artificial Sequence: Synthetic polynucleotide"
tccctgacagctggctggtggctcatcaggccggagcagctggcccatgtcctggggcactagggaagcttggtcatcctgcagtgcgtggtccgcaccaggatcagctacacccactggtaccagcagaagggccaggtccctgaggcactccaccagctggccatgtccaagttggatgtgcagtgggattccatcctgaaagcagataaaatcatagccaaggatggcagcagctctatcttggcagtactgaagttggagacaggcatcgagggcatgaactactgcacaacctgg

SEQ ID NO: 3015 - DNA, 300 bp, Artificial Sequence
  source: /note="Description of Artificial Sequence: Synthetic polynucleotide"
gcaataaaaaatgtcaactacatttttgtcaacagagcaacagataaaagtgtctaggtatcttgtgtggtgtccactgaagactttgtaaatatagttatacactggtaccagcagaaactgaatctaaattatgagccatctgacaactatcacttcaataacaagccccagttcgagtttgcttaggtgagaaaaacaagaaacttgaggcaagaacaaattttcaaatgtctacttcagtctttaccataaacttcataggaaaggaagatgaggccatttactactgcactgctt

SEQ ID NO: 3016 - DNA, 100 bp, Artificial Sequence
  source: /note="Description of Artificial Sequence: Synthetic polynucleotide"
attataagaaactctttggcagtggaacaacacttgttgtcacaggtaagtatcggaagaatacaacatttccaaggtaatagagggaaggcaggaaatg

SEQ ID NO: 3017 - DNA, 100 bp, Artificial Sequence
  source: /note="Description of Artificial Sequence: Synthetic polynucleotide"
attataagaaactctttggcagtggaacaacacttgttgtcacaggtaagtatcggaagaatacaacatttccaaggtaatagagggaaagcaggaaatt

SEQ ID NO: 3018 - DNA, 100 bp, Artificial Sequence
  source: /note="Description of Artificial Sequence: Synthetic polynucleotide"
aagagttgggcaaaaaaatcaaggtatttggtcccggaacaaagcttatcattacaggtaagttttctttaaattttgcaatgtaaagaagggatgggag

SEQ ID NO: 3019 - DNA, 100 bp, Artificial Sequence
  source: /note="Description of Artificial Sequence: Synthetic polynucleotide"
actggttggttcaagatatttgctgaagggactaagctcatagtaacttcacctggtaagtaacttttctttctgtttttattccagtaatgaaaaactg

SEQ ID NO: 3020 - DNA, 100 bp, Artificial Sequence
  source: /note="Description of Artificial Sequence: Synthetic polynucleotide"
agtgattggatcaagacgtttgcaaaagggactaggctcatagtaacttcgcctggtaagtaattttttttctgtttttattccagtaatgaaaaactga

SEQ ID NO: 3021 - DNA, 300 bp, Artificial Sequence
  source: /note="Description of Artificial Sequence: Synthetic polynucleotide"
agcccactcccaggtgcagctggtgcagtctggggctgaggtgaagaagcctggggcctcagtgaaggtctcctgcaaggcttctggatacaccttcaccggctactatatgcactgggtgcgacaggcccctggacaagggcttgagtggatgggatggatcaaccctaacagtggtggcacaaactatgcacagaagtttcagggcagggtcaccatgaccagggacacgtccatcagcacagcctacatggagctgagcaggctgagatctgacgacacggccgtgtattactgtgc

SEQ ID NO: 3022 - DNA, 300 bp, Artificial Sequence
  source: /note="Description of Artificial Sequence: Synthetic polynucleotide"
tgtccactcccaggttcagctggtgcagtctggggctgaggtgaagaagcctggggcctcagtgaaggtttcctgcaaggcttctggatacaccttcactagctatgctatgcattgggtgcgccaggcccccggacaaaggcttgagtggatgggatggagcaacgctggcaatggtaacacaaaatattcacaggagttccagggcagagtcaccattaccagggacacatccgcgagcacagcctacatggagctgagcagcctgagatctgaggacatggctgtgtattactgtgc

SEQ ID NO: 3023 - DNA, 300 bp, Artificial Sequence
  source: /note="Description of Artificial Sequence: Synthetic polynucleotide"
tgcccactcccaggtgcagctggtgcagtctggggctgaggtgaagaagcctggggcctcagtgaaggtctcctgcaaggcttctggatacaccttcaccagttatgatatcaactgggtgcgacaggccactggacaagggcttgagtggatgggatggatgaaccctaacagtggtaacacaggctatgcacagaagttccagggcagagtcaccatgaccaggaacacctccataagcacagcctacatggagctgagcagcctgagatctgaggacacggccgtgtattactgtgc

SEQ ID NO: 3024 - DNA, 300 bp, Artificial Sequence
  source: /note="Description of Artificial Sequence: Synthetic polynucleotide"
tgcccactcccaggttcagctggtgcagtctggagctgaggtgaagaagcctggggcctcagtgaaggtctcctgcaaggcttctggttacacctttaccagctatggtatcagctgggtgcgacaggcccctggacaagggcttgagtggatgggatggatcagcgcttacaatggtaacacaaactatgcacagaagctccagggcagagtcaccatgaccacagacacatccacgagcacagcctacatggagctgaggagcctgagatctgacgacacggccgtgtattactgtgc

SEQ ID NO: 3025 - DNA, 300 bp, Artificial Sequence
  source: /note="Description of Artificial Sequence: Synthetic polynucleotide"
cacccacgcccaggtccagctggtacagtctggggctgaggtgaagaagcctggggcctcagtgaaggtctcctgcaaggtttccggatacaccctcactgaattatccatgcactgggtgcgacaggctcctggaaaagggcttgagtggatgggaggttttgatcctgaagatggtgaaacaatctacgcacagaagttccagggcagagtcaccatgaccgaggacacatctacagacacagcctacatggagctgagcagcctgagatctgaggacacggccgtgtattactgtgc

SEQ ID NO: 3026 - DNA, 300 bp, Artificial Sequence
  source: /note="Description of Artificial Sequence: Synthetic polynucleotide"
tgcctactcccagatgcagctggtgcagtctggggctgaggtgaagaagactgggtcctcagtgaaggtttcctgcaaggcttccggatacaccttcacctaccgctacctgcactgggtgcgacaggcccccggacaagcgcttgagtggatgggatggatcacacctttcaatggtaacaccaactacgcacagaaattccaggacagagtcaccattaccagggacaggtctatgagcacagcctacatggagctgagcagcctgagatctgaggacacagccatgtattactgtgc

SEQ ID NO: 3027 - DNA, 300 bp, Artificial Sequence
  source: /note="Description of Artificial Sequence: Synthetic polynucleotide"
tgctcactcccaggtgcagctggtgcagtctggggctgaggtgaagaagcctggggcctcagtgaaggtttcctgcaaggcatctggatacaccttcaccagctactatatgcactgggtgcgacaggcccctggacaagggcttgagtggatgggaataatcaaccctagtggtggtagcacaagctacgcacagaagttccagggcagagtcaccatgaccagggacacgtccacgagcacagtctacatggagctgagcagcctgagatctgaggacacggccgtgtattactgtgc

SEQ ID NO: 3028 - DNA, 300 bp, Artificial Sequence
  source: /note="Description of Artificial Sequence: Synthetic polynucleotide"
tgcccactcccaaatgcagctggtgcagtctgggcctgaggtgaagaagcctgggacctcagtgaaggtctcctgcaaggcttctggattcacctttactagctctgctatgcagtgggtgcgacaggctcgtggacaacgccttgagtggataggatggatcgtcgttggcagtggtaacacaaactacgcacagaagttccaggaaagagtcaccattaccagggacatgtccacaagcacagcctacatggagctgagcagcctgagatccgaggacacggccgtgtattactgtgc

SEQ ID NO: 3029 - DNA, 300 bp, Artificial Sequence
  source: /note="Description of Artificial Sequence: Synthetic polynucleotide"
tgtccagtcccaggtgcagctggtgcagtctggggctgaggtgaagaagcctgggtcctcggtgaaggtctcctgcaaggcttctggaggcaccttcagcagctatgctatcagctgggtgcgacaggcccctggacaagggcttgagtggatgggagggatcatccctatctttggtacagcaaactacgcacagaagttccagggcagagtcacgattaccgcggacaaatccacgagcacagcctacatggagctgagcagcctgagatctgaggacacggccgtgtattactgtgc

SEQ ID NO: 3030 - DNA, 300 bp, Artificial Sequence
  source: /note="Description of Artificial Sequence: Synthetic polynucleotide"
tgcccactcccaggtccagctggtgcagtcttgggctgaggtgaggaagtctggggcctcagtgaaagtctcctgtagtttttctgggtttaccatcaccagctacggtatacattgggtgcaacagtcccctggacaagggcttgagtggatgggatggatcaaccctggcaatggtagcccaagctatgccaagaagtttcagggcagattcaccatgaccagggacatgtccacaaccacagcctacacagacctgagcagcctgacatctgaggacatggctgtgtattactatgc

SEQ ID NO: 3031 - DNA, 300 bp, Artificial Sequence
  source: /note="Description of Artificial Sequence: Synthetic polynucleotide"
cacccacgccgaggtccagctggtacagtctggggctgaggtgaagaagcctggggctacagtgaaaatctcctgcaaggtttctggatacaccttcaccgactactacatgcactgggtgcaacaggcccctggaaaagggcttgagtggatgggacttgttgatcctgaagatggtgaaacaatatacgcagagaagttccagggcagagtcaccataaccgcggacacgtctacagacacagcctacatggagctgagcagcctgagatctgaggacacggccgtgtattactgtgc

SEQ ID NO: 3032 - DNA, 300 bp, Artificial Sequence
  source: /note="Description of Artificial Sequence: Synthetic polynucleotide"
tgtcccagatcaccttgaaggagtctggtcctacgctggtgaaacccacacagaccctcacgctgacctgcaccttctctgggttctcactcagcactagtggagtgggtgtgggctggatccgtcagcccccaggaaaggccctggagtggcttgcactcatttattggaatgatgataagcgctacagcccatctctgaagagcaggctcaccatcaccaaggacacctccaaaaaccaggtggtccttacaatgaccaacatggaccctgtggacacagccacatattactgtgcac

SEQ ID NO: 3033 - DNA, 300 bp, Artificial Sequence
  source: /note="Description of Artificial Sequence: Synthetic polynucleotide"
tgtcccaggtcaccttgaaggagtctggtcctgtgctggtgaaacccacagagaccctcacgctgacctgcaccgtctctgggttctcactcagcaatgctagaatgggtgtgagctggatccgtcagcccccagggaaggccctggagtggcttgcacacattttttcgaatgacgaaaaatcctacagcacatctctgaagagcaggctcaccatctccaaggacacctccaaaagccaggtggtccttaccatgaccaacatggaccctgtggacacagccacatattactgtgcac

SEQ ID NO: 3034 - DNA, 300 bp, Artificial Sequence
  source: /note="Description of Artificial Sequence: Synthetic polynucleotide"
tatcccaggtcaccttgagggagtctggtcctgcgctggtgaaacccacacagaccctcacactgacctgcaccttctctgggttctcactcagcactagtggaatgtgtgtgagctggatccgtcagcccccagggaaggccctggagtggcttgcactcattgattgggatgatgataaatactacagcacatctctgaagaccaggctcaccatctccaaggacacctccaaaaaccaggtggtccttacaatgaccaacatggaccctgtggacacagccacgtattattgtgcac

SEQ ID NO: 3035 - DNA, 300 bp, Artificial Sequence
  source: /note="Description of Artificial Sequence: Synthetic polynucleotide"
tgtccagtgtgaggtgcagctggtggagtctgggggaggcttggtccagcctggggggtccctgagactctcctgtgcagcctctggattcacctttagtagctattggatgagctgggtccgccaggctccagggaaggggctggagtgggtggccaacataaagcaagatggaagtgagaaatactatgtggactctgtgaagggccgattcaccatctccagagacaacgccaagaactcactgtatctgcaaatgaacagcctgagagccgaggacacggctgtgtattactgtgc

SEQ ID NO: 3036 - DNA, 300 bp, Artificial Sequence
  source: /note="Description of Artificial Sequence: Synthetic polynucleotide"
tccagtgtgaagtgcagctggtggagtctgggggaggcttggtacagcctggcaggtccctgagactctcctgtgcagcctctggattcacctttgatgattatgccatgcactgggtccggcaagctccagggaagggcctggagtgggtctcaggtattagttggaatagtggtagcataggctatgcggactctgtgaagggccgattcaccatctccagagacaacgccaagaactccctgtatctgcaaatgaacagtctgagagctgaggacacggccttgtattactgtgcaa

SEQ ID NO: 3037 - DNA, 300 bp, Artificial Sequence
  source: /note="Description of Artificial Sequence: Synthetic polynucleotide"
tgtccagtgtcaggtgcagctggtggagtctgggggaggcttggtcaagcctggagggtccctgagactctcctgtgcagcctctggattcaccttcagtgactactacatgagctggatccgccaggctccagggaaggggctggagtgggtttcatacattagtagtagtggtagtaccatatactacgcagactctgtgaagggccgattcaccatctccagggacaacgccaagaactcactgtatctgcaaatgaacagcctgagagccgaggacacggccgtgtattactgtgc

SEQ ID NO: 3038 - DNA, 300 bp, Artificial Sequence
  source: /note="Description of Artificial Sequence: Synthetic polynucleotide"
aggtgtccagtgtgaggtgcagctggtggagtctgggggaggcttggtacagcctggggggtccctgagactctcctgtgcagcctctggattcaccttcagtagctacgacatgcactgggtccgccaagctacaggaaaaggtctggagtgggtctcagctattggtactgctggtgacacatactatccaggctccgtgaagggccgattcaccatctccagagaaaatgccaagaactccttgtatcttcaaatgaacagcctgagagccggggacacggctgtgtattactgtgc

SEQ ID NO: 3039 - DNA, 300 bp, Artificial Sequence
  source: /note="Description of Artificial Sequence: Synthetic polynucleotide"
gtgtgaggtgcagctggtggagtctgggggaggcttggtaaagcctggggggtcccttagactctcctgtgcagcctctggattcactttcagtaacgcctggatgagctgggtccgccaggctccagggaaggggctggagtgggttggccgtattaaaagcaaaactgatggtgggacaacagactacgctgcacccgtgaaaggcagattcaccatctcaagagatgattcaaaaaacacgctgtatctgcaaatgaacagcctgaaaaccgaggacacagccgtgtattactgtac

SEQ ID NO: 3040 - DNA, 300 bp, Artificial Sequence
  source: /note="Description of Artificial Sequence: Synthetic polynucleotide"
tgtccagtgtgaggtgcagctggtggagtctgggggaggcttggtacagcctggggggtccctgagactctcctgtgcagcctctggattcaccttcagtaacagtgacatgaactgggcccgcaaggctccaggaaaggggctggagtgggtatcgggtgttagttggaatggcagtaggacgcactatgtggactccgtgaagcgccgattcatcatctccagagacaattccaggaactccctgtatctgcaaaagaacagacggagagccgaggacatggctgtgtattactgtgt

SEQ ID NO: 3041 - DNA, 300 bp, Artificial Sequence
  source: /note="Description of Artificial Sequence: Synthetic polynucleotide"
tgtccagtgtgaggtgcagctggtggagtctgggggaggtgtggtacggcctggggggtccctgagactctcctgtgcagcctctggattcacctttgatgattatggcatgagctgggtccgccaagctccagggaaggggctggagtgggtctctggtattaattggaatggtggtagcacaggttatgcagactctgtgaagggccgattcaccatctccagagacaacgccaagaactccctgtatctgcaaatgaacagtctgagagccgaggacacggccttgtatcactgtgc

SEQ ID NO: 3042 - DNA, 300 bp, Artificial Sequence
  source: /note="Description of Artificial Sequence: Synthetic polynucleotide"
tgtccagtgtgaggtgcagctggtggagtctgggggaggcctggtcaagcctggggggtccctgagactctcctgtgcagcctctggattcaccttcagtagctatagcatgaactgggtccgccaggctccagggaaggggctggagtgggtctcatccattagtagtagtagtagttacatatactacgcagactcagtgaagggccgattcaccatctccagagacaacgccaagaactcactgtatctgcaaatgaacagcctgagagccgaggacacggctgtgtattactgtgc

SEQ ID NO: 3043 - DNA, 300 bp, Artificial Sequence
  source: /note="Description of Artificial Sequence: Synthetic polynucleotide"
tgtccagtgtgaggtgcagctgttggagtctgggggaggcttggtacagcctggggggtccctgagactctcctgtgcagcctctggattcacctttagcagctatgccatgagctgggtccgccaggctccagggaaggggctggagtgggtctcagctattagtggtagtggtggtagcacatactacgcagactccgtgaagggccggttcaccatctccagagacaattccaagaacacgctgtatctgcaaatgaacagcctgagagccgaggacacggccgtatattactgtgc

SEQ ID NO: 3044 - DNA, 300 bp, Artificial Sequence
  source: /note="Description of Artificial Sequence: Synthetic polynucleotide"
tgtccagtgtcaggtgcagctggtggagtctgggggaggcgtggtccagcctgggaggtccctgagactctcctgtgcagcctctggattcaccttcagtagctatggcatgcactgggtccgccaggctccaggcaaggggctggagtgggtggcagttatatcatatgatggaagtaataaatactatgcagactccgtgaagggccgattcaccatctccagagacaattccaagaacacgctgtatctgcaaatgaacagcctgagagctgaggacacggctgtgtattactgtgc

SEQ ID NO: 3045 - DNA, 300 bp, Artificial Sequence; identical to SEQ ID NO: 3044
  source: /note="Description of Artificial Sequence: Synthetic polynucleotide"

SEQ ID NO: 3046 - DNA, 300 bp, Artificial Sequence
  source: /note="Description of Artificial Sequence: Synthetic polynucleotide"
tgtccagtgtcaggtgcagctggtggagtctgggggaggcgtggtccagcctgggaggtccctgagactctcctgtgcagcgtctggattcaccttcagtagctatggcatgcactgggtccgccaggctccaggcaaggggctggagtgggtggcagttatatggtatgatggaagtaataaatactatgcagactccgtgaagggccgattcaccatctccagagacaattccaagaacacgctgtatctgcaaatgaacagcctgagagccgaggacacggctgtgtattactgtgc

SEQ ID NO: 3047 - DNA, 300 bp, Artificial Sequence
  source: /note="Description of Artificial Sequence: Synthetic polynucleotide"
tgtccagtgtgaggtgcagctggtggagtctgggggaggcttggtacagcctgggggatccctgagactctcctgtgcagcctctggattcaccttcagtaacagtgacatgaactgggtccatcaggctccaggaaaggggctggagtgggtatcgggtgttagttggaatggcagtaggacgcactatgcagactctgtgaagggccgattcatcatctccagagacaattccaggaacaccctgtatctgcaaacgaatagcctgagggccgaggacacggctgtgtattactgtgt

SEQ ID NO: 3048 - DNA, 300 bp, Artificial Sequence
  source: /note="Description of Artificial Sequence: Synthetic polynucleotide"
tgcaggtgtccagtgtgaggtgcagctggtggagtctgggggaggcttggtacagcctagggggtccctgagactctcctgtgcagcctctggattcaccgtcagtagcaatgagatgagctggatccgccaggctccagggaaggggctggagtgggtctcatccattagtggtggtagcacatactacgcagactccaggaagggcagattcaccatctccagagacaattccaagaacacgctgtatcttcaaatgaacaacctgagagctgagggcacggccgtgtattactgtgc

SEQ ID NO: 3049 - DNA, 300 bp, Artificial Sequence
  source: /note="Description of Artificial Sequence: Synthetic polynucleotide"
tccagtgtgaagtgcagctggtggagtctgggggagtcgtggtacagcctggggggtccctgagactctcctgtgcagcctctggattcacctttgatgattataccatgcactgggtccgtcaagctccggggaagggtctggagtgggtctctcttattagttgggatggtggtagcacatactatgcagactctgtgaagggccgattcaccatctccagagacaacagcaaaaactccctgtatctgcaaatgaacagtctgagaactgaggacaccgccttgtattactgtgcaa

SEQ ID NO: 3050 - DNA, 300 bp, Artificial Sequence
  source: /note="Description of Artificial Sequence: Synthetic polynucleotide"
tgtccagtgtgaggtgcagctggtggagtctgggggaggcttggtacagcctggggggtccctgagactctcctgtgcagcctctggattcaccttcagtagctatagcatgaactgggtccgccaggctccagggaaggggctggagtgggtttcatacattagtagtagtagtagtaccatatactacgcagactctgtgaagggccgattcaccatctccagagacaatgccaagaactcactgtatctgcaaatgaacagcctgagagacgaggacacggctgtgtattactgtgc

SEQ ID NO: 3051 - DNA, 300 bp, Artificial Sequence
  source: /note="Description of Artificial Sequence: Synthetic polynucleotide"
atgtgaggtgcagctggtggagtctgggggaggcttggtacagccagggcggtccctgagactctcctgtacagcttctggattcacctttggtgattatgctatgagctggttccgccaggctccagggaaggggctggagtgggtaggtttcattagaagcaaagcttatggtgggacaacagaatacgccgcgtctgtgaaaggcagattcaccatctcaagagatgattccaaaagcatcgcctatctgcaaatgaacagcctgaaaaccgaggacacagccgtgtattactgtac

SEQ ID NO: 3052 - DNA, 300 bp, Artificial Sequence
  source: /note="Description of Artificial Sequence: Synthetic polynucleotide"
aggtgtccagtgtgaggtgcagctggtggagtctggaggaggcttgatccagcctggggggtccctgagactctcctgtgcagcctctgggttcaccgtcagtagcaactacatgagctgggtccgccaggctccagggaaggggctggagtgggtctcagttatttatagcggtggtagcacatactacgcagactccgtgaagggccgattcaccatctccagagacaattccaagaacacgctgtatcttcaaatgaacagcctgagagccgaggacacggccgtgtattactgtgc

SEQ ID NO: 3053 - DNA, 300 bp, Artificial Sequence
  source: /note="Description of Artificial Sequence: Synthetic polynucleotide"
tgtccagtgtgaggtgcagctggtggagtctggggaaggcttggtccagcctggggggtccctgagactctcctgtgcagcctctggattcaccttcagtagctatgctatgcactgggtccgccaggctccagggaagggactggaatatgtttcagctattagtagtaatgggggtagcacatattatgcagactctgtgaagggcagattcaccatctccagagacaattccaagaacacgctgtatcttcaaatgggcagcctgagagctgaggacatggctgtgtattactgtgc

SEQ ID NO: 3054 - DNA, 300 bp, Artificial Sequence
  source: /note="Description of Artificial Sequence: Synthetic polynucleotide"
aggtgtccagtgtgaggtgcagctggtggagtctggaggaggcttgatccagcctggggggtccctgagactctcctgtgcagcctctgggttcaccgtcagtagcaactacatgagctgggtccgccaggctccagggaaggggctggagtgggtctcagttatttatagctgtggtagcacatactacgcagactccgtgaagggccgattcaccatctccagagacaattccaagaacacgctgtatcttcaaatgaacagcctgagagctgaggacacggctgtgtattactgtgc

SEQ ID NO: 3055 - DNA, 300 bp, Artificial Sequence
  source: /note="Description of Artificial Sequence: Synthetic polynucleotide"
gtgtgaggtgcagctggtggagtctgggggaggcttggtccagcctggagggtccctgagactctcctgtgcagcctctggattcaccttcagtgaccactacatggactgggtccgccaggctccagggaaggggctggagtgggttggccgtactagaaacaaagctaacagttacaccacagaatacgccgcgtctgtgaaaggcagattcaccatctcaagagatgattcaaagaactcactgtatctgcaaatgaacagcctgaaaaccgaggacacggccgtgtattactgtgc

SEQ ID NO: 3056 - DNA, 300 bp, Artificial Sequence
  source: /note="Description of Artificial Sequence: Synthetic polynucleotide"
gtgtgaggtgcagctggtggagtccgggggaggcttggtccagcctggggggtccctgaaactctcctgtgcagcctctgggttcaccttcagtggctctgctatgcactgggtccgccaggcttccgggaaagggctggagtgggttggccgtattagaagcaaagctaacagttacgcgacagcatatgctgcgtcggtgaaaggcaggttcaccatctccagagatgattcaaagaacacggcgtatctgcaaatgaacagcctgaaaaccgaggacacggccgtgtattactgtac

SEQ ID NO: 3057 - DNA, 300 bp, Artificial Sequence
  source: /note="Description of Artificial Sequence: Synthetic polynucleotide"
tgtccagtgtgaggtgcagctggtggagtccgggggaggcttagttcagcctggggggtccctgagactctcctgtgcagcctctggattcaccttcagtagctactggatgcactgggtccgccaagctccagggaaggggctggtgtgggtctcacgtattaatagtgatgggagtagcacaagctacgcggactccgtgaagggccgattcaccatctccagagacaacgccaagaacacgctgtatctgcaaatgaacagtctgagagccgaggacacggctgtgtattactgtgc

SEQ ID NO: 3058 - DNA, 300 bp, Artificial Sequence
  source: /note="Description of Artificial Sequence: Synthetic polynucleotide"
tgtccagtgtcaggtgcagctggtggagtctgggggaggcgtggtccagcctggggggtccctgagactctcctgtgcagcgtctggattcaccttcagtagctatggcatgcactgggtccgccaggctccaggcaaggggctggagtgggtggcatttatacggtatgatggaagtaataaatactatgcagactccgtgaagggccgattcaccatctccagagacaattccaagaacacgctgtatctgcaaatgaacagcctgagagctgaggacacggctgtgtattactgtgc

SEQ ID NO: 3059 - DNA, 300 bp, Artificial Sequence
  source: /note="Description of Artificial Sequence: Synthetic polynucleotide"
tgcaggtgtccagtgtgaggtgcagctggtggagtctcggggagtcttggtacagcctggggggtccctgagactctcctgtgcagcctctggattcaccgtcagtagcaatgagatgagctgggtccgccaggctccagggaagggtctggagtgggtctcatccattagtggtggtagcacatactacgcagactccaggaagggcagattcaccatctccagagacaattccaagaacacgctgcatcttcaaatgaacagcctgagagctgaggacacggctgtgtattactgtaa

SEQ ID NO: 3060 - DNA, 300 bp, Artificial Sequence
  source: /note="Description of Artificial Sequence: Synthetic polynucleotide"
aggggtcctgtcccaggtgcagctgcaggagtcgggcccaggactggtgaagccttcggagaccctgtccctcacctgcactgtctctggtggctccatcagtagttactactggagctggatccggcagcccgccgggaagggactggagtggattgggcgtatctataccagtgggagcaccaactacaacccctccctcaagagtcgagtcaccatgtcagtagacacgtccaagaaccagttctccctgaagctgagctctgtgaccgccgcggacacggccgtgtattactgtgc

SEQ ID NO: 3061 - DNA, 300 bp, Artificial Sequence
  source: /note="Description of Artificial Sequence: Synthetic polynucleotide"
ggtcctgtcccaggtgcagctgcaggagtcgggcccaggactggtgaagccttcggacaccctgtccctcacctgcgctgtctctggttactccatcagcagtagtaactggtggggctggatccggcagcccccagggaagggactggagtggattgggtacatctattatagtgggagcacctactacaacccgtccctcaagagtcgagtcaccatgtcagtagacacgtccaagaaccagttctccctgaagctgagctctgtgaccgccgtggacacggccgtgtattactgtgc

SEQ ID NO: 3062 - DNA, 300 bp, Artificial Sequence
  source: /note="Description of Artificial Sequence: Synthetic polynucleotide"
cctgtcccagctgcagctgcaggagtccggctcaggactggtgaagccttcacagaccctgtccctcacctgcgctgtctctggtggctccatcagcagtggtggttactcctggagctggatccggcagccaccagggaagggcctggagtggattgggtacatctatcatagtgggagcacctactacaacccgtccctcaagagtcgagtcaccatatcagtagacaggtccaagaaccagttctccctgaagctgagctctgtgaccgccgcggacacggccgtgtattactgtgc

SEQ ID NO: 3063 - DNA, 300 bp, Artificial Sequence
  source: /note="Description of Artificial Sequence: Synthetic polynucleotide"
cctgtcccaggtgcagctgcaggagtcgggcccaggactggtgaagccttcacagaccctgtccctcacctgcactgtctctggtggctccatcagcagtggtgattactactggagttggatccgccagcccccagggaagggcctggagtggattgggtacatctattacagtgggagcacctactacaacccgtccctcaagagtcgagttaccatatcagtagacacgtccaagaaccagttctccctgaagctgagctctgtgactgccgcagacacggccgtgtattactgtgc

SEQ ID NO: 3064 - DNA, 300 bp, Artificial Sequence
  source: /note="Description of Artificial Sequence: Synthetic polynucleotide"
cctgccccaggtgcagctgcaggagtcgggcccaggactggtgaagccttcacagaccctgtccctcacctgtactgtctctggtggctccatcagcagtggtggttactactggagctggatccgccagcacccagggaagggcctggagtggattgggtacatctattacagtgggagcacctactacaacccgtccctcaagagtcgagttaccatatcagtagacacgtctaagaaccagttctccctgaagctgagctctgtgactgccgcggacacggccgtgtattactgtgc

SEQ ID NO: 3065 - DNA, 300 bp, Artificial Sequence
  source: /note="Description of Artificial Sequence: Synthetic polynucleotide"
aggggtcctgtcccaggtgcagctacagcagtggggcgcaggactgttgaagccttcggagaccctgtccctcacctgcgctgtctatggtgggtccttcagtggttactactggagctggatccgccagcccccagggaaggggctggagtggattggggaaatcaatcatagtggaagcaccaactacaacccgtccctcaagagtcgagtcaccatatcagtagacacgtccaagaaccagttctccctgaagctgagctctgtgaccgccgcggacacggctgtgtattactgtgc

SEQ ID NO: 3066 - DNA, 300 bp, Artificial Sequence
  source: /note="Description of Artificial Sequence: Synthetic polynucleotide"
cctgtcccagctgcagctgcaggagtcgggcccaggactggtgaagccttcggagaccctgtccctcacctgcactgtctctggtggctccatcagcagtagtagttactactggggctggatccgccagcccccagggaaggggctggagtggattgggagtatctattatagtgggagcacctactacaacccgtccctcaagagtcgagtcaccatatccgtagacacgtccaagaaccagttctccctgaagctgagctctgtgaccgccgcagacacggctgtgtattactgtgc

SEQ ID NO: 3067 - DNA, 300 bp, Artificial Sequence
  source: /note="Description of Artificial Sequence: Synthetic polynucleotide"
aggggtcctgtcccaggtgcagctgcaggagtcgggcccaggactggtgaagccttcggagaccctgtccctcacctgcactgtctctggtggctccatcagtagttactactggagctggatccggcagcccccagggaagggactggagtggattgggtatatctattacagtgggagcaccaactacaacccctccctcaagagtcgagtcaccatatcagtagacacgtccaagaaccagttctccctgaagctgagctctgtgaccgctgcggacacggccgtgtattactgtgc

SEQ ID NO: 3068 - DNA, 300 bp, Artificial Sequence
  source: /note="Description of Artificial Sequence: Synthetic polynucleotide"
cctgtcccaggtgcagctgcaggagtcgggcccaggactggtgaagccttcggagaccctgtccctcacctgcactgtctctggtggctccgtcagcagtggtggttactactggagctggatccggcagcccccagggaagggactggagtggattgggtatatctattacagtgggagcaccaactacaacccctccctcaagagtcgagtcaccatatcagtagacacgtccaagaaccagttctccctgaagctgagctctgtgaccgctgcggacacggccgtgtattactgtgc

SEQ ID NO: 3069 - DNA, 300 bp, Artificial Sequence
  source: /note="Description of Artificial Sequence: Synthetic polynucleotide"
ggtcctgtcccaggtgcagctgcaggagtcgggcccaggactggtgaagccttcggagaccctgtccctcacctgcgctgtctctggttactccatcagcagtggttactactggggctggatccggcagcccccagggaaggggctggagtggattgggagtatctatcatagtgggagcacctactacaacccgtccctcaagagtcgagtcaccatatcagtagacacgtccaagaaccagttctccctgaagctgagctctgtgaccgccgcagacacggccgtgtattactgtgc

SEQ ID NO: 3070 - DNA, 300 bp, Artificial Sequence
  source: /note="Description of Artificial Sequence: Synthetic polynucleotide"
agtctgtgccgaggtgcagctggtgcagtctggagcagaggtgaaaaagcccggggagtctctgaagatctcctgtaagggttctggatacagctttaccagctactggatcggctgggtgcgccagatgcccgggaaaggcctggagtggatggggatcatctatcctggtgactctgataccagatacagcccgtccttccaaggccaggtcaccatctcagccgacaagtccatcagcaccgcctacctgcagtggagcagcctgaaggcctcggacaccgccatgtattactgtgc

SEQ ID NO: 3071 - DNA, 300 bp, Artificial Sequence
  source: /note="Description of Artificial Sequence: Synthetic polynucleotide"
agtctgtgccgaagtgcagctggtgcagtctggagcagaggtgaaaaagcccggggagtctctgaggatctcctgtaagggttctggatacagctttaccagctactggatcagctgggtgcgccagatgcccgggaaaggcttggagtggatggggaggattgatcctagtgactcttataccaactacagcccgtccttccaaggccacgtcaccatctcagctgacaagtccatcagcactgcctacctgcagtggagcagcctgaaggcctcggacaccgccatgtattactgtgc

SEQ ID NO: 3072 - DNA, 300 bp, Artificial Sequence
  source: /note="Description of Artificial Sequence: Synthetic polynucleotide"
acaggtacagctgcagcagtcaggtccaggactggtgaagccctcgcagaccctctcactcacctgtgccatctccggggacagtgtctctagcaacagtgctgcttggaactggatcaggcagtccccatcgagaggccttgagtggctgggaaggacatactacaggtccaagtggtataatgattatgcagtatctgtgaaaagtcgaataaccatcaacccagacacatccaagaaccagttctccctgcagctgaactctgtgactcccgaggacacggctgtgtattactgtgc

SEQ ID NO: 3073 - DNA, 300 bp, Artificial Sequence
  source: /note="Description of Artificial Sequence: Synthetic polynucleotide"
tgcccactcccaggtgcagctggtgcaatctgggtctgagttgaagaagcctggggcctcagtgaaggtttcctgcaaggcttctggatacaccttcactagctatgctatgaattgggtgcgacaggcccctggacaagggcttgagtggatgggatggatcaacaccaacactgggaacccaacgtatgcccagggcttcacaggacggtttgtcttctccttggacacctctgtcagcacggcatatctgcagatctgcagcctaaaggctgaggacactgccgtgtattactgtgc

SEQ ID NO: 3074 - DNA, 300 bp, Artificial Sequence
  source: /note="Description of Artificial Sequence: Synthetic polynucleotide"
tacctactcccaggtgcagctggtgcagtctggccatgaggtgaagcagcctggggcctcagtgaaggtctcctgcaaggcttctggttacagtttcaccacctatggtatgaattgggtgccacaggcccctggacaagggcttgagtggatgggatggttcaacacctacactgggaacccaacatatgcccagggcttcacaggacggtttgtcttctccatggacacctctgccagcacagcatacctgcagatcagcagcctaaaggctgaggacatggccatgtattactgtgc

SEQ ID NO: 3075 - DNA, 300 bp, Artificial Sequence
  source: /note="Description of Artificial Sequence: Synthetic polynucleotide"
gaacgggggctgtgggctgtggtgtccgcttgtgactcatctctttgcttcttgtccctgagtgtcctgcatcagatgcagctactggagtcatgcccagggctggtgaggtcctcacagacctctgggcctggacccagcagccctctgggaaggcgctggggcacctcagctccaggggcagcacacacttcagcccagcctttctgggccaactctccatctgtagagacacatccaaggcccagttatccctgcagctgagctccgtgatggccaagggcagggccgcacattccc

SEQ ID NO: 3076 - DNA, 300 bp, Artificial Sequence
  source: /note="Description of Artificial Sequence: Synthetic polynucleotide"
cctatgaaaaaaattgtgtttttcagtgcactcatgttctagtaaagccctcagagaccctctccttcacctgtgctgtctctggatttccaatcataaccagtacttcctcctggagctgtatctgccagcccccagggaagaagctgaagtgggtcaggtgtgtaggtcacgaggaaacacacagtgcaacccgcttctcaagagtccagtcaccacctccagatccacattcagaaaacagtttttcctacagctgagctacccgcacaatgagtaaaccaccatggatttttatac

SEQ ID NO: 3077 - DNA, 300 bp, Artificial Sequence
  source: /note="Description of Artificial Sequence: Synthetic polynucleotide"
tgtgcatgccgacaactgtgattctcggtgcactcctggcctggtgaagccctcacagatcctccccctggcctgtggcatctctgcttctccattacaaccagtgcttcctgctggagctggatccgtcaccccccggggaagggactggagcgaatcaggtgcacaggtcatgagggagtgcacaatccaacccactcctcaagagtccagtcaccatctccagatccacatccaaaaaacagtttctcctacagctgagctaccttaacaaggagtacacaaccatgatttttatac

SEQ ID NO: 3078 - DNA, 300 bp, Artificial Sequence
  source: /note="Description of Artificial Sequence: Synthetic polynucleotide"
gtcccaggtgcagctgcaggagtcaggtccaggacccatgaggccctcagacactgccctctgcctgtgctgtgtctggattcttttttttaccatggatattatttgagatgaatccaccatcccgtgggcaacaggctggaatggctggggcacagttactagactggatcatcaaggaatacacatcatgcaccctccacccaggtccatgtccccatcaacagtgactcaaccaagagccagttctctgtgaagctcagctccatgaccacctaggacacggctgagtattactgt

SEQ ID NO: 3079 - DNA, 300 bp, Artificial Sequence
  source: /note="Description of Artificial Sequence: Synthetic polynucleotide"
tgtgttgcccagaacctgttaacatcaacaactatgtttctcagcacacttctggcttgagactccttgcagaccctctcctcacctgcactgtctctggattccccatcataaccagtgtttcctgctagaattgtatctgcttgcccctagaagatggacaggagtggatcaggtgcatgggttgtgaagggagcacaaattacaacccactgctcaagagtccatatccagatccaagaaacagttcttacagctgagctctgtgcccagtgaacacacaactacgcatttttaagc

SEQ ID NO: 3080 - DNA, 300 bp, Artificial Sequence
  source: /note="Description of Artificial Sequence: Synthetic polynucleotide"
ctgccaacaactgtatttctcggtgcactcttggcctggtgaagccttcacagaacctctccctcacctgtgccatctctgcattctccatcacaaccagtgtttcctgctggagctgcatccatcagcgcccccatgggaggtactggagtggatcgggtgcataggtcatggagggagcacaaattactcccctcttctcaagagtccagtcaccatctccagatccatgtccaaaaagtagttcttcttacagctgaactatgtgaggaacaaacacatagccatgtattttagagc

SEQ ID NO: 3081 - DNA, 300 bp, Artificial Sequence
  source: /note="Description of Artificial Sequence: Synthetic polynucleotide"
tgttgtccagaaactgttaacatcaacaactgtgttttccagtgcacttctggcttgagacatcctcacagaccctctccctcacctgcactgtctctggattccccatcataaccagtgtgtcctgctagaattgtatctgcttgcccctagaagatggacaggagtggatcaggttcatgggttgtaaagggagcaaaaattacatcccacttctcaagagtccatatccagatccaagaaacagttcttacagctgagctctgtgcccagtgaacacacaactacacattttgaagc

SEQ ID NO: 3082 - DNA, 300 bp, Artificial Sequence
  source: /note="Description of Artificial Sequence: Synthetic polynucleotide"
ctgccaacaactgtatttctcggtgcactcttggcctggtgaagccttcacagaacctctccctcacctgtgccatctctgcattctccatcacaaccagtgtttccttctggagctgcatccatcagcgcccccatgggaggtactggagtggatcgggtgcataggtcatggagggagcacagattactcccctcttctcaagagtccagtcaccatctccagatccatgtccaaaaagtacttcttcttacaggtgaactatgtgagcaacaaacacatagccatgtattttagagc

SEQ ID NO: 3083 - DNA, 300 bp, Artificial Sequence
  source: /note="Description of Artificial Sequence: Synthetic polynucleotide"
gggtttccaatgtatcatccagaacttgtgcatgctaacaactgtttttctcagtcaattatcagcctggtgaagcccttgcaaaccccctcactcacctgtgctgcctctggattctctgtcacaatcagtgcttcctgtaggcactggatggaaagcacaggagtgggtcaggtgcatacgtgatgagtggaggatgaattccagcccacttatcatgaattcagacaagcccacatgttcccacatgcactatatcttcagacaagcagatgtgtctgcacatgaattcttctttca

SEQ ID NO: 3084 - DNA, 300 bp, Artificial Sequence
  source: /note="Description of Artificial Sequence: Synthetic polynucleotide"
ctgagattgacaggcttacaagtgtcttagtccagcagttttcggtaacaggctatccactttcattttctcttcctcacatgccccatttctgggttgtccatcccaaccaacagttactgctggagctgaatccactagcccgcttccatgggctgtcaggaacacattgcaagggtgacacacacgatgatccatctctgcagagccaactctccttctccagagattcatccaagaaacaattttgactatacctgagctctgtgacatctgaggacatggtttgtattactgtgc

SEQ ID NO: 3085 - DNA, 300 bp, Artificial Sequence
  source: /note="Description of Artificial Sequence: Synthetic polynucleotide"
agctgcaggagtcagccctggacctgaatagcacacacttaccctctgcctcacctacactgttactggccactccgtcacaaccagtccttactagtggacctggatctgccggctctcagggaggggctgcaatggataaaatccattgctagtggtggtgggagtccatttgtcttgtggaaaatggcagcatttccttattttataaggcataataatgctatgttgtgtacacataccacattgtctttatccatttgcccattgacagacacttagtttccatatcttggctgt

SEQ ID NO: 3086 - DNA, 300 bp, Artificial Sequence
  source: /note="Description of Artificial Sequence: Synthetic polynucleotide"
gtgcatgccgacatctgtatttctcgtgcgttcttggcctggcgaagccctcacagaccctctccctcatctgtgctgtctctgcttctccatcacaaccagtgcttcctgctggagctggatccctcagctccccagggaagggactggagtgaatcaggtgcacaggtcatgagggagaacacaacgcaacccacgcctcaagagtccagtcaccatctccagatccacatccaaaacacagtttcttctacagctgagctacctgagcaacgagtacacaaccatgaatttttacac

SEQ ID NO: 3087 - DNA, 300 bp, Artificial Sequence
  source: /note="Description of Artificial Sequence: Synthetic polynucleotide"
ccagaagccatgcacaccaaccactgtgtttcatggtcatttattggcctggtgaggccctcacagaccccctccctcacctgtgctgtctctggattctccatcacaactagtgcttcctgctggagctggatccgccagtcctcagtcaagggagtggatcagggcataggtcacgagggagcacaaattctaacccactcctcatgagctcagtcaccatctccagatccacgtccaagaaccaaattttcttttagctgagttctgtgaccaacaatgccacaaccttgtattact

SEQ ID NO: 3088 - DNA, 300 bp, Artificial Sequence
  source: /note="Description of Artificial Sequence: Synthetic polynucleotide"
gtgcatgccaacaactgtgtttctcagtgcccacttggcctggtgaagccctcacagaccctctccctcacctgtgctgtctctggattccccatcacaaccagtgcttcctgctgtagctgcattcataaaccccccaggaagggactggagtgaatccagtgcacaggtcatgagggagtgcacattccaacccactcctcaagagtccagtcaccatctccagatccatgtccaaaaagcagttcttcctacagccgagctaagtgagtcacaagcacacagccatgtatttttaac

SEQ ID NO: 3089 - DNA, 300 bp, Artificial Sequence
  source: /note="Description of Artificial Sequence: Synthetic polynucleotide"
tgtgctcacaaacaactgtgtttcttagtgcactcttggcctggtggagccctcgcagaccctctccctcacctgtgctgtctctggattttccatcacaaccagtgtttcctgctggagctggatccacgagtccacatgggaaggactggagtggaccaggcgcacacgtcatgaagggagcaaaaattcccacccactccttatgaatccagtcaccatctccaaattcgggtccaaaaaacacttgtttttacagtggagctatgtgagcaacaagctcacagccatgttttaaag

SEQ ID NO: 3090 - DNA, 300 bp, Artificial Sequence
  source: /note="Description of Artificial Sequence: Synthetic polynucleotide"
cctgccaacaactgtgtttctcggtgcactcttggcctggtgaagcccccaaagaccctctccctcatgtgtgtcatctctgcattctccatcacaaccagtgcttcctcctggatctgcatccatcaccccctctctgggagggaatggagtggattgggtccatagatgatgaagggagcacacattactcccctttcctcaagagtccagtcaccatccccagatccatgtccaaaaacagttcttcctacagctgagctacatgagcaacaatcacatagccatatatttttcagc

SEQ ID NO: 3091 - DNA, 300 bp, Artificial Sequence
  source: /note="Description of Artificial Sequence: Synthetic polynucleotide"
gcatgccaacaactgtgtttctcctgcactcttgggctagtgaagctctcacagaccctctctctcacctgtgctgtctctgcattctccatcacaaccagtgcttcctgctggagctgcatccatcaccccccgcaaggaagggactggagcgaatcaggtgcacaggtcatgagggagtgcacattccaacccactcctcaagagtccagtcactatctccagatccacatccaaaaaacagtgtttcctgtagctgagctacctgagcaacaagtacacaaccatgaattttaatac

SEQ ID NO: 3092 - DNA, 300 bp, Artificial Sequence
  source: /note="Description of Artificial Sequence: Synthetic polynucleotide"
atgccaacaactgtgtttctcagcgcactcttggcctggtgaagccctcacagaccctctcccttacctgcgctgtgtctgtgttccccgtgataacgaggtcttcctgctgaagctggatccatcagccccccagggaagggaatggagtggattgggtgcataggtcatgaagggagcacacattaccacccactcctcaagtgtccagtcaccatccccagatccgtgtccaaaaaagcagttcttcctacagctgagctacatgagcaacaagcacatagccatgtatttttaagc

SEQ ID NO: 3093 - DNA, 300 bp, Artificial Sequence
  source: /note="Description of Artificial Sequence: Synthetic polynucleotide"
acggaagtcctgtgtgaagtttactgatggagtcagagggggaaaaaatttacagcccagtggtgagactctcctgcaaagcctctggtttcacctttactggttacagcatgagcttggtccagcacgcttcacaacagggataggtgtgggtgccaacagtgagtgatcaagtatgaattctcagggttactttccatgagtacaaataaattaacaatctcaagcaacacccttttaagtgcagtctgccttacaatgaccaatctgaaagccaaggacaaggtcatgtattactgt

SEQ ID NO: 3094 - DNA, 149 bp, Artificial Sequence
  source: /note="Description of Artificial Sequence: Synthetic polynucleotide"
aatagattttctcaggatttgtttgtccgacagagtatttatttgtctttgatttatcatctcaagagacaatgtcaagaagatgctgtttctgcaaatgggcaatctgcaaaccaaggacacgtcactacattactgtgcaagagaag

SEQ ID NO: 3095 - DNA, 300 bp, Artificial Sequence
  source: /note="Description of Artificial Sequence: Synthetic polynucleotide"
aaccacaaaggtttactggatctatatttttgtctttggcaaaatagcctggctattctcttagcttcttctgcaaagcatcaagattcaccttcactgactgcagcatttattgggccctgatggctggaggagaggggctggagtgggtggtagccatgagtgacccaagtggaagttctcagtggtgctctgctccagcacaaagaagattcacagttcctggggacaacacttaacatcacaatctcccttaaaattatctactggaaagctgaggagtaggcagtgtattactgt

SEQ ID NO: 3096 - DNA, 300 bp, Artificial Sequence
  source: /note="Description of Artificial Sequence: Synthetic polynucleotide"
ttttcagaagtcccctgtgaagttaactaatggagttagacagagaaatactacagaccaggaattctgccttttctgcaaagcctctggattcactttcactgaaaacagcataagcttgatccagcaggcttcatgacaggggtgggtgtgggtaataacaataattcaaatagaagttctcagtgggactctccttgagtaaaaagatgattaacaatcctcaaatacactcagttcaggagattctcttttaagatgattaacctgagagctcaggaaaagtccgtgtattacttt

SEQ ID NO: 3097 - DNA, 300 bp, Artificial Sequence
  source: /note="Description of Artificial Sequence: Synthetic polynucleotide"
gaagtcctgtgtgaaatttactgatagagtcaggggggaaaattgtacagcccagtggttcactgagactctcatgcaaagcctctgatttcacctttactggctacagcatgagcttggtccagcaggcttcatgacagggattggtgtgggtggaaacagtgagtgatcaagtgggagttctcagagttactctccatgagtacaaataaattaacagtcccaagcgacaccttttcatgtgcagtctaccttaaagggaccaaactgaaagtcaaggacaaggccttgtaatactgt

SEQ ID NO: 3098 - DNA, 300 bp, Artificial Sequence
  source: /note="Description of Artificial Sequence: Synthetic polynucleotide"
agtcctgtgtgatgtttactgatggagtcagaaggagaaaaatttaacagcccagcagttcactgagactgtcctgcaaagcctctggtttcgggtttactgggtgcagcatgagcttggtccagcacgcttcacaacaggaattggtgtgggtagcaacagtgagagatcatatgggagttctaagggttactctccatgagtacagataaatcaacattcccaagtgacaccctttcaagtgcagtctaccttacaaggaccaacctgaaagccaagggcaaggccgtatattacagt

SEQ ID NO: 3099 - DNA, 300 bp, Artificial Sequence
  source: /note="Description of Artificial Sequence: Synthetic polynucleotide"
tctgtgtgtgcagaagtcctctgtgaagttaactagtggagtcagacaggaaaatactacagaccaagaattctcagactgttctgcaaagcccctggattcactgaaaaaagaacaagtttggtccagcaggattcatggcaagtgttggtgagggagataacagtaattcaagtggaagttctcaatgggactcgccttcagtacaaagaagattaacagtcctcagagacactgttcagaagattctcttttaagataataaaactgagagcccaagacaagtctgtgtattactgt

SEQ ID NO: 3100 - DNA, 300 bp, Artificial Sequence
  source: /note="Description of Artificial Sequence: Synthetic polynucleotide"
tccatgggttacaaaataatgggttggcttttcttccaacactttacagacaccatcaattttcctcttgcttataaggttttaaccagaagaatgctgtcatcatctttcctgttcttttagaaagaatgccccctcaactcatctccacttgtctgcatgtatttctatttgtctttggttttcagcagttttaataagattcacctaaatgtgtgtgtgtgtgtcgaggggtgttatgctattgttctgtgttctctgagatgcatggattcaccgtttactctgtctccatttttg

SEQ ID NO: 3101 - DNA, 300 bp, Artificial Sequence
  source: /note="Description of Artificial Sequence: Synthetic polynucleotide"
agaggtcccctgtgaagttaattactggagtctctcagagaaatactacagaccaagaattctcagacttttctggaaaccctgtggattcactttcactgaaaacagcataagcttggtccagcaggcttcatgacaggggtgggtgtaggtgataacatcagtaattcaagtggaagttctcagtgggactctccttgagtacaaagaagattaacagtcctcagagacacgcttttcagatgattctctcttaagatgattaacctgagagctcaggaaaattccgtttattactgt

SEQ ID NO: 3102 - DNA, 300 bp, Artificial Sequence
  source: /note="Description of Artificial Sequence: Synthetic polynucleotide"
tatccagggtgaggcccagcttacagagtctgggggagacttggtacactgagaggggcccctgaggctctcctgtgcagcctcttggttcaccttcagtatctatgagattcactgggtttgccaggcctcagggaaggggctggaatgggttgcagttatatggcgtagtgaaagtcatcaatacaatgcagactatgttaggggcagactcaccacttccagagacaacaccaagtacatgctgtacatgcaaatgaacagcctgagaacccagaacatggcagcatttaactgtgc

SEQ ID NO: 3103 - DNA, 149 bp, Artificial Sequence
  source: /note="Description of Artificial Sequence: Synthetic polynucleotide"
aataggttttctcaggttttattggtccgacagaatatttatttgtctttgatttattgtctccagagacaatgtcaagaatatgctatatctgcaaatgggcgatctgtaaaccaagaacacatcagtatatcactgtgcaagaggag

SEQ ID NO: 3104 - DNA, 300 bp, Artificial Sequence
  source: /note="Description of Artificial Sequence: Synthetic polynucleotide"
tactggatctatatttttatctttggcaaaacagcctggctgttctcttagcctcttttgcaaagcatcaagattcaccttcactgactacagcataaattgagcccagatggctgggggacagaggctggagtgggtggtaacagtgattgattcaagtggaagttctcagtgatattctgcatcagcataatgaagattcacaattcccagggacaccaattaccagcacagtctcccttaaaataatctacttggaagctgagggggctctcacaggggtaggcagtgtattactgt

SEQ ID NO: 3105 - DNA, 300 bp, Artificial Sequence
  source: /note="Description of Artificial Sequence: Synthetic polynucleotide"
aagtcctgtatgaagttcagtggtggagtcagaggggtaaacgtagtacagcccagtggttcactgagactttcttgcaaagcgtctggattcaccttttctggcaacagcctgaggttggtccagcaggcttcacaacagggattgtggtggctggcaacagtgagtcaacaagtgggagtgctcaggtttactcttcatgagtacaaataaattaactggtccagcgacaccctttcacgtgcactctaccttacaatgactaacctgaaagccaaggacaaggttgtgtaatactgt

SEQ ID NO: 3106 - DNA, 300 bp, Artificial Sequence
  source: /note="Description of Artificial Sequence: Synthetic polynucleotide"
agtcctacaagaagttcactggtggaatctggaagagaaatgatacagcctaactgttctcagagccttttttacaaagcctctgaatttaccttcattgactctagcatgagctcagcccagcaggcttcaggacaggggttggtgtgggaggcaaaagcgagggattcaagtggaatttgttagtggtaccctccatcaatacaaagaaaaatcataatcctcagggacacccttgtcagcacagtctccctcaaaatgaccaacctgagagccgaggagaaggccatgtattactgt

SEQ ID NO: 3107 - DNA, 300 bp, Artificial Sequence
  source: /note="Description of Artificial Sequence: Synthetic polynucleotide"
ctctgtgttcatgtaagtcctgttgaagcttactgatggagtcagagggggaaacattgtacagcccagcggttctcacagactctcctgcaaagcctctgatttcacttgtactggctacagcatgagcttggtccagcaggcttcatgacagggatttgtgtgggtggcaacagtgagttatcagggttactctccatgagtacaagtaaattaacagtcccaagcaacaccctttcaagtgcagtctaccttaaaatgaccaatgtgaaagccaaggacaagaccttgtattactgt

SEQ ID NO: 3108 - DNA, 300 bp, Artificial Sequence
  source: /note="Description of Artificial Sequence: Synthetic polynucleotide"
tctcaggggttcacagtgaggaccaccttgtgcaatgggaggaagaagtagtggtccccttggtcatgctcagcctcacctatgccgcctatgcacattcaatttctgaacattctgtttcctggatccaccatctcccatcaaaaggtcttcagtgtgttggtgtgatatgggttaagggaaacactaagccccaaccttcagggcagagctagcatctccagaaacacatagtaaaaaacaagaaaacttacagctgagaagtgtgatggctggggatgcaggcgtgtattactgtgc

SEQ ID NO: 3109 - DNA, 300 bp, Artificial Sequence
  source: /note="Description of Artificial Sequence: Synthetic polynucleotide"
tcctgattatatgactcacccagcttctgatgactctcctgttgccagcgtccatggcctcagtgaaggtctcctgcaaagctctggatacaccttcgccagctacgacattcactgtgtgtgacaggcccctggataagggtttgaatggatggtagggagctactctggcaatggtaacacaggctatgcacagaagtttcagggcagagtcaccatgaccagggacacgtccacgagcacagcctacatggagctgagcagtcagagatctgaggacatagatgtgtactactgtgc

SEQ ID NO: 3110 - DNA, 300 bp, Artificial Sequence
  source: /note="Description of Artificial Sequence: Synthetic polynucleotide"
tgtccattcccaggttcagctgttgcagcctggggctgaggtgaagaagcctgcgtcctcagtgaaggtctcctggccaggcttccagatacaccttcaccaaatactttacacagtgggtgcgacagggccctggacaagggcatagtggttgggatgcatcaacccttacaatgataacacacactacgcacagaagttccggggcagagtcaccattaccagtgacaggtccgtgagcacagcctacatggagctgagcagcctgagatctgaagacatggtcgtgtattcctgtgt

SEQ ID NO: 3111 - DNA, 300 bp, Artificial Sequence
  source: /note="Description of Artificial Sequence: Synthetic polynucleotide"
cagtcccaggtgcagctggtgcagtctggggatgagatgaagaaggctggggcatcagtgaaagtctcctgcaagacttgtggatacacctaccttcaccagttactctatgcactaggtgcgccaggcccatgcacaagggcttgagtggatgggaaggatgtgccctagtgatggcagcataagctacgcagagaagttccagggcagagtcaccatgaccagggacacatccacgagcacagcctacatggagctgagcagcctgagatctgaagacacggccatgtattactgtgg

SEQ ID NO: 3112 - DNA, 300 bp, Artificial Sequence
  source: /note="Description of Artificial Sequence: Synthetic polynucleotide"
tgtctgctcccaggtgcagctggggcagtctgaggctgaggtaaagaagcctggggcctcagtgaaggtctcctgcaaggcttccggatacaccttcacttgctgctccttgcactggttgcaacaggcccctggacaagggcttgaaaggatgagatggatcacactttacaatggtaacaccaactatgcaaagaagttccagggcagagtcaccattaccagggacatgtccctgaggacagcctacatagagctgagcagcctgagatctgaggactcggctgtgtattactgggc

SEQ ID NO: 3113 - DNA, 300 bp, Artificial Sequence
  source: /note="Description of Artificial Sequence: Synthetic polynucleotide"
gtgtccattcccaggttcagctgttgcagcctggggctgaggtgaagaagcctgggtcctcagtgaaggtctcctgccaggcttccagatacaccttcaccaaatactttacacggtgggtgtgacaaagccctggacaagggcatagtggatgggatgaatcaacccttacaatgataacacacactatgcacagacgttctggggcagagtcaccattaccagtgacaggtccatgagcacagcctacatggagctgagcagcctgagatctgaagacatggtcgtgtattactgtgt

SEQ ID NO: 3114 - DNA, 300 bp, Artificial Sequence
  source: /note="Description of Artificial Sequence: Synthetic polynucleotide"
tatcccaggtcaccttgaaggagtctggtcctgcactggtgaaacccacacagaccctcatgctgacctgcaccttctctgggttctcactcagcacttctggaatgggtgtgggttagatctgtcagccctcagcaaaggccctggagtggcttgcacacatttattagaatgataataaatactacagcccatctctgaagagtaggctcattatctccaaggacacctccaagaatgaagtggttctaacagtgatcaacatggacattgtggacacagccacacattactgtgcaa

SEQ ID NO: 3115 - DNA, 300 bp, Artificial Sequence
  source: /note="Description of Artificial Sequence: Synthetic polynucleotide"
gtgtccagtgtgagatgcagctggtagagtctggagcaaacttgacaaagcctgggtgtccctgagactctcctgtgcagcctctggattcaccttcagtagccatagcacgcactgggtcccccaggctccagggaagggtctgcagtgggtcccagttattagtggtagtggtagtaccatgtactacgcagactctgtgaagggccgattcaccatttccagagacaataccaaaaactcactgtatctgcaaatgaacagactgagggcagaggatgcagctgcatatgactctgt

SEQ ID NO: 3116 - DNA, 300 bp, Artificial Sequence
  source: /note="Description of Artificial Sequence: Synthetic polynucleotide"
cctgggtacaacagtgcagctggtggagtctgggggaggcttggtagagcctggggggtccctgagactctcctgtgcagcctctggattcaccttcagtaacagtgacatgaactgggtccgccaggctccaggaaaggggctggagtgggtatcgggtgttagttggaatggcagtaggacgcactatgcagactctgtgaagggccgattcatcatctccagagacaattccaggaacttcctgtatcagcaaatgaacagcctgaggcccgaggacatggctgtgtattactgtgt

SEQ ID NO: 3117 - DNA, 300 bp, Artificial Sequence
  source: /note="Description of Artificial Sequence: Synthetic polynucleotide"
gtgtgaggtgcagctggtggagtctgggggaggcttggtacagcctggggggtccctgagactctcctgtgcagcctctggattcaccttcagttactactacatgagcggggtccgccaggctcccgggaaggggctggaatgggtaggtttcattagaaacaaagctaatggtgggacaacagaatagaccacgtctgtgaaaggcagattcacaatctcaagagatgattccaaaagcatcacctatctgcaaatgaagagcctgaaaaccgaggacacggccgtgtattactgttc

SEQ ID NO: 3118 - DNA, 300 bp, Artificial Sequence
  source: /note="Description of Artificial Sequence: Synthetic polynucleotide"
tatccagtgtgagatgcagctggtggagtctgggggaggcttggcaaagcctgcgtggtccccgagactctcctgtgcagcctctcaattcaccttcagtagctactacatgaactgtgtccgccaggctccagggaatgggctggagttggtttgacaagttaatcctaatgggggtagcacatacctcatagactccggtaaggaccgattcaatacctccagagataacgccaagaacacacttcatctgcaaatgaacagcctgaaaaccgaggacacggccctctattagtgtac

SEQ ID NO: 3119 - DNA, 300 bp, Artificial Sequence
  source: /note="Description of Artificial Sequence: Synthetic polynucleotide"
ttcagtgtgaggtggagctgatagagcccacagaggacctgagacaacctgggaagttcctgagactctcctgtgtagcctctagattcgccttcagtagcttctgaatgagcccagttcaccagtctgcaggcaaggggctggagtgagtaatagatataaaagatgatggaagtcagatacaccatgcagactctgtgaagggcagattctccatctccaaagacaatgctaagaactctctgtatctgcaaatgaacagtcagagaactgaggacatggctgtgtatggctgtacat

SEQ ID NO: 3120 - DNA, 300 bp, Artificial Sequence
  source: /note="Description of Artificial Sequence: Synthetic polynucleotide"
tctagtgagaggtacagctcgtggagtccggagaggacccaagacaacctgggggatccctgagactctcctgtgcagactctggattaaccttcagtagctactgaaggaactcggtttcccaggctccagggaaggggctggagtgagtagtagatatacagtgtgatggaagtcagatatgttatgcataatctttgaagagcaaattcaccatctccaaagaaaatgccaagaactcactgtatttgctaatgaacagtctgagagcagcgggcacagctgtgtgttactgtatgt

SEQ ID NO: 3121 - DNA, 300 bp, Artificial Sequence
  source: /note="Description of Artificial Sequence: Synthetic polynucleotide"
ttcagtgtgaggtggagctgatagagtccatagaggacctgagacaacctgggaagttcctgagactctcctgtgtagcctctagattcgccttcagtagcttctgaatgagccgagttcaccagtctccaggcaaggggctggagtgagtaatagatataaaagatgatggaagtcagatacaccatgcagactctgtgaagggcagattctccatctccaaagacaatgctaagaactctctgtatctgcaaatgaacactcagagagctgaggacgtggccgtgtatggctatacat

SEQ ID NO: 3122 - DNA, 300 bp, Artificial Sequence
  source: /note="Description of Artificial Sequence: Synthetic polynucleotide"
tctagtgagaggtacagctcgtggagtccggagaggacccaagacaacctgggggatccttgagactctcctgtgcagactctggattaaccttcagtagctactgaatgagctcggtttcccaggctccagggaaggggctggagtgagtagtagatatacagtgtgatggaagtcagatatgttatgcccaatctgtgaagagcaaattcaccatctccaaagaaaatgccaagaactcactgtatttgcaaatgaacagtctgagagcagagggcacagctgtgtgttactgtatgt

SEQ ID NO: 3123 - DNA, 300 bp, Artificial Sequence
  source: /note="Description of Artificial Sequence: Synthetic polynucleotide"
agtgtgaggtgcagctggtggagtctttgggaggcttgttatagcctgggggtccctgagactttcttttgcagcctctggattcacctttagtacctttattaggtactggatgagctgggtccatcaggctcctgggaaagggctggagtaggtctcatttatgagttgttgtgtaggtagcacaagctatgcagactctgtgaagggtcgattcaccctctccagagatgatgccaagaaatcactgtatctgcaaatgaacagcgtcagagccgaggataggtctgtgtattactg

SEQ ID NO: 3124 - DNA, 300 bp, Artificial Sequence
  source: /note="Description of Artificial Sequence: Synthetic polynucleotide"
ggtgtgcagtatgaggtgcagctggtagagtctgggggagacttggtacagctgtggtggggttgggggtgtcctgagactctcatgtgcagcctgcggattcatcttgagaagcaatgacatgaactgggcccaccgggcttcaagaaaggggctggaatgggtctcatacattagtgctagtggtggtagcctatactatgcagacactgaagggtagattcaccatctctagagacaatggcaagaacatgctgtacttgcaaatgaacagtctgagagatgaggactcggctgtgt

SEQ ID NO: 3125 - DNA, 300 bp, Artificial Sequence
  source: /note="Description of Artificial Sequence: Synthetic polynucleotide"
aggtgtccagtgtgaggtgcagctggtggagtctgggggaggcttggtccagcctggggggtccctgagactctcctgtgcagcctcaggattctcctttagtagctatggcatgagctgggtccgccaggctccagggaaggggctggagtgagtggcacatatctggaatgatggaagtcagaaatactatgcagactctgtgaagggccgattcacaatctccgagacaattctaagagcatgctctatctgcaaatggacagtctgaaagctaaggacacggccatgtattactgt

SEQ ID NO: 3126 - DNA, 300 bp, Artificial Sequence
  source: /note="Description of Artificial Sequence: Synthetic polynucleotide"
cgtgaggcgcagctggtggagtctgggggaggcttggtacagcctgggtgggtccccgagactctcatttgcagcttctagattcaccttcagtgacttctgaatgcactggatccgccaggcttctgggaaagggctggagtgggttggccgtattagaaccaaacgtaacagttacacgacagaatgcgctgcatctgtgaaaggcaggttcaccatctcaagagatgattcaaagaacacactgtatctgcaagtgaataccctgaaaaccgagtacacggccatctattactgtac

SEQ ID NO: 3127 - DNA, 300 bp, Artificial Sequence
  source: /note="Description of Artificial Sequence: Synthetic polynucleotide"
aggtgtccagtgtgaggatcagctggtggagtctgggggaggcttggtacagcctggggggtccctgagaccctcctgtgcagcctctggattcgccttcagtagctatgttctgcactgggttcgccgggctccagggaagggtccggagtgggtatcagctattggtactggtggtgatacatactatgcagactccgtgatgggccgattcaccatctccagagacaacgccaagaagtccttgtatcttcaaatgaacagcctgatagctgaggacatggctgtgtattattgtgc

SEQ ID NO: 3128 - DNA, 300 bp, Artificial Sequence
  source: /note="Description of Artificial Sequence: Synthetic polynucleotide"
gtctagtgtggggtgcagatggtggagtcttggggagagttggcacaagctgaatgtgcctgagactctgccgtgcatcctctgaatccaccttctgtagctactagatcagctgaatctgccaggctccaggaaaggggctgcagtgagtagtagatataatgtacgatggaagtcagacataatatgcagactctgtgaaggtcagattcaccatctccaaagacaatgccaagcacaggttgtatctgcaaatgaacagtctgagagctgagaatatggctctgtattattgagtca

SEQ ID NO: 3129 - DNA, 300 bp, Artificial Sequence
  source: /note="Description of Artificial Sequence: Synthetic polynucleotide"
tgtccagtgtgaggtgcagctggtggagtctgggtgaggcttggtacagcctggagggtccctgagactctcctgtgcagcctctggattcaccttcagtagctcctggatgcactgggtctgccaggctccggagaaggggctggagtgggtggccgacataaagtgtgacggaagtgagaaatactatgtagactctgtgaagggccgattgaccatctccagagacaatgccaagaactccctctatctgcaagtgaacagcctgagagctgaggacatgaccgtgtattactgtgt

SEQ ID NO: 3130 - DNA, 300 bp, Artificial Sequence
  source: /note="Description of Artificial Sequence: Synthetic polynucleotide"
tccagtgtgaggtacagctggtggagtctgaagaaaaccaaagacaacttgggggatccctgagactctcctgtgcagactctggattaaccttcagtagctactgaatgagctcagattcccaggctccagggaaggggctggagtgagtagtagatatatagtaggatagaagtcagctatgttatgcacaatctgtgaagagcagattcaccatctccaaagaaaatgccaagaactcactctgtttgcaaatgaacagtctgagagcagagggcacggccgtgtattactgtatgt

SEQ ID NO: 3131 - DNA, 300 bp, Artificial Sequence
  source: /note="Description of Artificial Sequence: Synthetic polynucleotide"
aagtcctgtgtgaagtttattgatggagtcagaggcagaaaattgtacagcccagtggttcactgagactctcctgcaaagcctctgatttcacctttactggctacagcatgagcttggtccagcaggcttcatgacagggattggtgtgggtggaaacagtgagtgatcaagtgggagttctcagagttactctccatgagtacaaataaattaacagtcccaagcgacaccttttcatgtgcagtctaccttacaatgaccaacctgaaagccaaggacaaggctgtgtattactgt

SEQ ID NO: 3132 - DNA, 300 bp, Artificial Sequence
  source: /note="Description of Artificial Sequence: Synthetic polynucleotide"
gtccagtgtgaggtgcagctggtggagtctgggggaggcttagtaaagactgggagggtctctgagactctcctgtgcagcctctggattcaccttcagtagctctgctatgcactgggtccaccaggctccaggaaagggtttggagtgggtctcagttattagtacaagtggtgataccgtactctacacagactctgtgaagggctgattcaccatctctagagacaatgcccagaattcactgtatctgcaaatgaacagcctgagagccgacgacatggctgtgtattactgtgt

SEQ ID NO: 3133 - DNA, 300 bp, Artificial Sequence
  source: /note="Description of Artificial Sequence: Synthetic polynucleotide"
tgtccagtgtgaggtgcagctggtggagtctggggaaggcttggtccagcctggggggtccctgagactctcctgtgcagcctctggattcaccttcagtagctctgctatgcactgggtccgccaggctccaagaaagggtttgtagtgggtctcagttattagtacaagtggtgataccgtactctacacagactctgtgaagggccgattcaccatctccagagacaatgcccagaattcactgtctctgcaaatgaacagcctgagagccgagggcacagttgtgtactactgtgt

SEQ ID NO: 3134 - DNA, 300 bp, Artificial Sequence
  source: /note="Description of Artificial Sequence: Synthetic polynucleotide"
ttcagtgtgaggtggagctgatagagtccatagagggcctgagacaacttgggaagttcctgagactctcctgtgtagcctctggattcaccttcagtagctactgaatgagctgggtcaatgagactctagggaaggggctggagggagtaatagatgtaaaatatgatggaagtcagatataccatgcagactctgtgaagggcagattcaccatctccaaagacaatgctaagaactcaccgtatctccaaacgaacagtctgagagctgaggacatgaccatgcatggctgtacat

SEQ ID NO: 3135 - DNA, 300 bp, Artificial Sequence
  source: /note="Description of Artificial Sequence: Synthetic polynucleotide"
tgtgaggtgcagctggtggagtctgggggaggcttggtacagcctggggggtccctgagactctcctgtgcagcctctggattcaccttccgttaactactgcatgcagtggatctgccgggctccaggaaaggggctggagtgggtaggtttcactaaaaacaaaactaatcgtggaacaacagaatacgccgcgtctgtgaaaggcagattcaccatctcaagcgatgattccaaaagcatcgcctatctgcaaatgaacagcctgaaaaccgaggacacggccgtgtattactatac

SEQ ID NO: 3136 - DNA, 300 bp, Artificial Sequence
  source: /note="Description of Artificial Sequence: Synthetic polynucleotide"
gtgtgaggtgcagctggtggagtccgggggaggcttggtccagcctggggggtccctgagactctcctgtgcagcctctggattcaccttcagtgactactacatgagctgggtccgccaggctcccgggaaggggctggagtgggtaggtttcattagaaacaaagctaatggtgggacaacagaatagaccacgtctgtgaaaggcagattcacaatctcaagagatgattccaaaagcatcacctatctgcaaatgaacagcctgagagccgaggacacggccgtgtattactgtgc

SEQ ID NO: 3137 - DNA, 300 bp, Artificial Sequence
  source: /note="Description of Artificial Sequence: Synthetic polynucleotide"
cgcagttgttggagcctgggggagacttggtacagcctggcgcggtgggggtgggggtccctgagactgtcctgtgcagcctctggatttgccttcagtagccactggatgcactgggcctgccaggctccagggaacagactggagtgggtctcatgtattagtactgatgggagtagcatacgctatgcacattctgggaagttctgattccccatctccagaaacaatgccaagaacacactcttatctggaaatgaacagtttgagagctgagtacacagccacgtattactgtgc

SEQ ID NO: 3138 - DNA, 300 bp, Artificial Sequence
  source: /note="Description of Artificial Sequence: Synthetic polynucleotide"
caggtgtccaatgtgaagtgtagctggtagagtctgggggaggcttggtacagcttggggggtccatgtgactctcctgtgcagcctctggatacactttcagtaactatggcatgcactaggtggaccaagctccagggaagggactggagtgggtcttacattaatgctagtggtggaggcatatactactcagactctgtgaagggccggttgaccatctccagagaaaacaccaagaactcactgtatctgcaaataaacagtttcattgctgacaccatggccgtctattactgt

SEQ ID NO: 3139 - DNA, 300 bp, Artificial Sequence
  source: /note="Description of Artificial Sequence: Synthetic polynucleotide"
tgtccagtgtgaggtacagctggtggagtctggagaggacccaagacaacctgggttccctgagactctcctgtgcagcctctggattaaccttcagtagctactgaatgagctcggtttcccaggctccagggaaggggctggagtgagtagtagatatacagtgtgatggaagtcagatatgttatgcacaatctgtgacgagcagattcaccgtctccaaagaaaatgccaagaactcactgtatttgcaaatgaacagtctgagagcagagggcacagctgtgtgttactgtatgt

SEQ ID NO: 3140 - DNA, 300 bp, Artificial Sequence
  source: /note="Description of Artificial Sequence: Synthetic polynucleotide"
aggtgtccagtgtgaggtgcagctggtggagtctgggggaggcttggtaaagcctggggggtccctgagactctcctgtgcagcctctggattcaccttcagtgactactacatgaactgggtccgccaggctccagggaaggggctggagtgggtctcatccattagtagtagtagtaccatatactacgcagactctgtgaagggccgattcaccatctccagagacaacgccaagaactcactgtatctgcaaatgaacagcctgagagccgaggacacggctgtgtattactgtgc

SEQ ID NO: 3141 - DNA, 300 bp, Artificial Sequence
  source: /note="Description of Artificial Sequence: Synthetic polynucleotide"
ggtcctgtcccaggtgcagctgcaggagtcgggcccaggactggtgaagccttcggagaccctgtccctcatctgcgctgtctctggtgactccatcagcagtggtaactggtgaatctgggtccgccagcccccagggaaggggctggagtggattggggaaatccatcatagtgggagcacctactacaacccgtccctcaagagtcgaatcaccatgtccgtagacacgtccaagaaccagttctacctgaagctgagctctgtgaccgccgcggacacggccgtgtattactgtgc

SEQ ID NO: 3142 - DNA, 300 bp, Artificial Sequence
  source: /note="Description of Artificial Sequence: Synthetic polynucleotide"
acaggggtcctgtcccagtgcagctgcaggagtggggcccaggactggtgaagcttcggagaccctgtccctcacatgcgctgtctctggtgactccatcagcagtggtaactggtggagctggtccgccagtccccagggaaggggctggaatggattggatacatctattatagtgggaggagctactacaccccgtccctcaggagttgagtcaccatgtcaatagaaacgtccaagaaccagttttccctgaagctgagctctgtgaccgcagggaggcggagggggcgggcgcag

SEQ ID NO: 3143 - DNA, 300 bp, Artificial Sequence
  source: /note="Description of Artificial Sequence: Synthetic polynucleotide"
agctgttgcagtctgcagcagaggtgaaaagacccggggagtctctgaggatctcctgtaagacttctggatacagctttaccagctactggatccactgggtgcgccagatgcccgggaaagaactggagtggatggggagcatctatcctgggaactctgataccagatacagcccatccttccaaggccacgtcaccatctcagccgacagctccagcagcaccgcctacctgcagtggagcagcctgaaggcctcggacgccgccatgtattattgtgtgagagggaccatctaaa

SEQ ID NO: 3144 - DNA, 300 bp, Artificial Sequence
  source: /note="Description of Artificial Sequence: Synthetic polynucleotide"
ctcctctccacaggtgtccactcacaggtgcagctggtgcagtctgggcctgaggtgaagaagcctggagcctcattgaaggtttcctgcaaggcttctggatacaccttcacaagctatgctatcagctgggtatgacaggcccatggacaagggcttgaggaaatgggatggatcaacaccaacactgggaacctaacgtatgcccagggcttcacaggacggtttgtcttctccatggacacctccgtcagcatggcatatcttcatatcagcagcctaaaggctgaggacacgtgc

SEQ ID NO: 3145 - DNA, 300 bp, Artificial Sequence
  source: /note="Description of Artificial Sequence: Synthetic polynucleotide"
aggtgcccactccctgcagctggtgcagtctgggcctgaggtgaagaagcctggggcctcagtgaaggtctcctataagtcttctggttacaccttcaccatctatggtatgaattgggtatgatagacccctggacagggctttgagtggatgtgatggatcatcacctacactgggaacccaacgtatacccacggcttcacaggatggtttgtcttctccatggacacgtctgtcagcacggcgtgtcttcagatcagcagcctaaaggctgaggacacggccgagtattactgtgc

SEQ ID NO: 3146 - DNA, 253 bp, Artificial Sequence
  source: /note="Description of Artificial Sequence: Synthetic polynucleotide"
tgattagataaaatatgatatatgtaaatcatggaatactatgcagccagtatggtatgaattcagtgtgaccagcccctggacaagggcttgagtggatgggatggatcatcacctacactgggaacccaacatataccaacggcttcacaggacggtttctattctccatggacacctctgtcagcatggcgtatctgaagatcagcagcctaaaggctgaggacacggccgtgtatgactgtatgagaga

SEQ ID NO: 3147 - DNA, 300 bp, Artificial Sequence
  source: /note="Description of Artificial Sequence: Synthetic polynucleotide"
ggtgcccactcccgagtgcagctggtgcagtctgggcctgaggtgaagcagcctggggcctcggcgaaggtctcctgcaaggtgtctggttaaactgtcatcacctatggtatgaattggatacgacagaccccaggacaggggcttgagtggatgggatggatcatcctaccctggtgaacccaatgtatgcccacagattcacacacggtttgtcttctccatggacacctctgtcagcacggcggatctgcagactagctgcctaaagactgaggatgcagccatttattactgtgt

SEQ ID NO: 3148 - DNA, 100 bp, Artificial Sequence
  source: /note="Description of Artificial Sequence: Synthetic polynucleotide"
atacttccagcactggggccagggcaccctggtcaccgtctcctcaggtgagtctgctgtctggggatagcggggagccaggtgtactgggccaggcaag

SEQ ID NO: 3149 - DNA, 100 bp, Artificial Sequence
  source: /note="Description of Artificial Sequence: Synthetic polynucleotide"
ggtacttcgatctctggggccgtggcaccctggtcactgtctcctcaggtgagtcccactgcagccccctcccagtcttctctgtccaggcaccaggcca

SEQ ID NO: 3150 - DNA, 100 bp, Artificial Sequence
  source: /note="Description of Artificial Sequence: Synthetic polynucleotide"
cttttgatatctggggccaagggacaatggtcaccgtctcttcaggtaagatggctttccttctgcctcctttctctgggcccagcgtcctctgtcctgg

SEQ ID NO: 3151 - DNA, 100 bp, Artificial Sequence
  source: /note="Description of Artificial Sequence: Synthetic polynucleotide"
tttgactactggggccagggaaccctggtcaccgtctcctcaggtgagtcctcacaacctctctcctgctttaactctgaagggttttgctgcatttctg

SEQ ID NO: 3152 - DNA, 100 bp, Artificial Sequence
  source: /note="Description of Artificial Sequence: Synthetic polynucleotide"
tggttcgacccctggggccagggaaccctggtcaccgtctcctcaggtgagtcctcaccaccccctctctgagtccacttagggagactcagcttgccag

SEQ ID NO: 3153 - DNA, 100 bp, Artificial Sequence
  source: /note="Description of Artificial Sequence: Synthetic polynucleotide"
tactactactactacatggacgtctggggcaaagggaccacggtcaccgtctcctcaggtaagaatggccactctagggcctttgttttctgctactgcc

SEQ ID NO: 3154 - DNA, 100 bp, Artificial Sequence
  source: /note="Description of Artificial Sequence: Synthetic polynucleotide"
tgctgggggcccctggacccgacccgccctggagaccgcagccacatcagcccccagccccacaggccccctaccagccgcagggttttggctgagctga

SEQ ID NO: 3155 - DNA, 100 bp, Artificial Sequence
  source: /note="Description of Artificial Sequence: Synthetic polynucleotide"
aagtgcttggagcactggggccagggcagcccggccaccgtctccctgggaacgtcacccctccctgcctgggtctcagcccgggggtctgtgtggctgg

SEQ ID NO: 3156 - DNA, 100 bp, Artificial Sequence
  source: /note="Description of Artificial Sequence: Synthetic polynucleotide"
agttggacttcccaggccgacagtggtctggcttctgaggggtcaggccagaatgtggggtacgtgggaggccagcagagggttccatgagaagggcagg

SEQ ID NO: 3157 - DNA, 495 bp, Artificial Sequence
  source: /note="Description of Artificial Sequence: Synthetic polynucleotide"
gccttgccagcccgctcagacacacgtgacactcttcttattttcataggctccatggatactggaattacccagacaccaaaatacctggtcacagcaatggggagtaaaaggacaatgaaacgtgagcatctgggacatgattctatgtattggtacagacagaaagctaagaaatccctggagttcatgttttactacaactgtaaggaattcattgaaaacaagactgtgccaaatcacttcacacctgaatgccctgacagctctcgcttataccttcatgtggtcgcactgcagcaagaagactcagctgcgtatctctgcaccagcagtgaacacacgtgacactctgtcgacactgaagctttctttggacaaggcaccagactcacagttgtaggtaagacatttttcaggttcttttgcagatccgtcacagggaaaagtgggtccacagacacacgtgacactctctgatggcgcgagggaggc

SEQ ID NO: 3158 - DNA, 495 bp, Artificial Sequence
  source: /note="Description of Artificial Sequence: Synthetic polynucleotide"
gccttgccagcccgctcagacacacgtttcggaactcttattttcataggctccatggatactggaattacccagacaccaaaatacctggtcacagcaatggggagtaaaaggacaatgaaacgtgagcatctgggacatgattctatgtattggtacagacagaaagctaagaaatccctggagttcatgttttactacaactgtaaggaattcattgaaaacaagactgtgccaaatcacttcacacctgaatgccctgacagctctcgcttataccttcatgtggtcgcactgcagcaagaagactcagctgcgtatctctgcaccagcagtgaacacacgtttcggaacgtcgactatggctacaccttcggttcggggaccaggttaaccgttgtaggtaaggctgggggtctctaggaggggtgcgatgagggaggactctgtcctgggaaatacacacgtttcggaacctgatggcgcgagggaggc

SEQ ID NO: 3159 - DNA, 495 bp, Artificial Sequence
  source: /note="Description of Artificial Sequence: Synthetic polynucleotide"
gccttgccagcccgctcagacacacgtaagtaacgtcttattttcataggctccatggatactggaattacccagacaccaaaatacctggtcacagcaatggggagtaaaaggacaatgaaacgtgagcatctgggacatgattctatgtattggtacagacagaaagctaagaaatccctggagttcatgttttactacaactgtaaggaattcattgaaaacaagactgtgccaaatcacttcacacctgaatgccctgacagctctcgcttataccttcatgtggtcgcactgcagcaagaagactcagctgcgtatctctgcaccagcagtgaacacacgtaagtaacggtcgacgaaacaccatatattttggagagggaagttggctcactgttgtaggtgagtaagtcaaggctggacagctgggaacttgcaaaaaggggctggaatccagacacacgtaagtaacgctgatggcgcgagggaggc

SEQ ID NO: 3160 - DNA, 495 bp, Artificial Sequence
  source: /note="Description of Artificial Sequence: Synthetic polynucleotide"
gccttgccagcccgctcagacacacgtgtctcctatcttattttcataggctccatggatactggaattacccagacaccaaaatacctggtcacagcaatggggagtaaaaggacaatgaaacgtgagcatctgggacatgattctatgtattggtacagacagaaagctaagaaatccctggagttcatgttttactacaactgtaaggaattcattgaaaacaagactgtgccaaatcacttcacacctgaatgccctgacagctctcgcttataccttcatgtggtcgcactgcagcaagaagactcagctgcgtatctctgcaccagcagtgaacacacgtgtctcctagtcgacaatgaaaaactgttttttggcagtggaacccagctctctgtcttgggtatgtaaaagacttctttcgggatagtgtatcataaggtcggagttccaggagacacacgtgtctcctactgatggcgcgagggaggc

SEQ ID NO: 3161 - DNA, 495 bp, Artificial Sequence
  source: /note="Description of Artificial Sequence: Synthetic polynucleotide"
gccttgccagcccgctcagacacacgtagagtgtctcttattttcataggctccatggatactggaattacccagacaccaaaatacctggtcacagcaatggggagtaaaaggacaatgaaacgtgagcatctgggacatgattctatgtattggtacagacagaaagctaagaaatccctggagttcatgttttactacaactgtaaggaattcattgaaaacaagactgtgccaaatcacttcacacctgaatgccctgacagctctcgcttataccttcatgtggtcgcactgcagcaagaagactcagctgcgtatctctgcaccagcagtgaacacacgtagagtgtcgtcgacatcagccccagcattttggtgatgggactcgactctccatcctaggtaagttgcagaatcagggtggtatggccattgtcccttgaaggcagagttctctacacacgtagagtgtcctgatggcgcgagggaggc

SEQ ID NO: 3162 - DNA, 495 bp, Artificial Sequence
  source: /note="Description of Artificial Sequence: Synthetic polynucleotide"
gccttgccagcccgctcagacacacgtgttccgaatcttattttcataggctccatggatactggaattacccagacaccaaaatacctggtcacagcaatggggagtaaaaggacaatgaaacgtgagcatctgggacatgattctatgtattggtacagacagaaagctaagaaatccctggagttcatgttttactacaactgtaaggaattcattgaaaacaagactgtgccaaatcacttcacacctgaatgccctgacagctctcgcttataccttcatgtggtcgcactgcagcaagaagactcagctgcgtatctctgcaccagcagtgaacacacgtgttccgaagtcgacataattcacccctccactttgggaacgggaccaggctcactgtgacaggtatgggggctccactcttgactcgggggtgcctgggtttgactgcaatgatacacacgtgttccgaactgatggcgcgagggaggc

SEQ ID NO: 3163 - DNA, 495 bp, Artificial Sequence
  source: /note="Description of Artificial Sequence: Synthetic polynucleotide"
gccttgccagcccgctcagacacacgtcgttactttcttattttcataggctccatggatactggaattacccagacaccaaaatacctggtcacagcaatggggagtaaaaggacaatgaaacgtgagcatctgggacatgattctatgtattggtacagacagaaagctaagaaatccctggagttcatgttttactacaactgtaaggaattcattgaaaacaagactgtgccaaatcacttcacacctgaatgccctgacagctctcgcttataccttcatgtggtcgcactgcagcaagaagactcagctgcgtatctctgcaccagcagtgaacacacgtcgttacttgtcgacacaatgagcagttcttcgggccagggacacggctcaccgtgctaggtaagaagggggctccaggtgggagagagggtgagcagcccagcctgcacgacccacacacgtcgttacttctgatggcgcgagggaggc

SEQ ID NO: 3164 - DNA, 495 bp, Artificial Sequence
  source: /note="Description of Artificial Sequence: Synthetic polynucleotide"
gccttgccagcccgctcagacacacgttaggagactcttattttcataggctccatggatactggaattacccagacaccaaaatacctggtcacagcaatggggagtaaaaggacaatgaaacgtgagcatctgggacatgattctatgtattggtacagacagaaagctaagaaatccctggagttcatgttttactacaactgtaaggaattcattgaaaacaagactgtgccaaatcacttcacacctgaatgccctgacagctctcgcttataccttcatgtggtcgcactgcagcaagaagactcagctgcgtatctctgcaccagcagtgaacacacgttaggagacgtcgacaccggggagctgttttttggagaaggctctaggctgaccgtactgggtaaggaggcggttggggctccggagagctccgagagggcgggatgggcagaggacacacgttaggagacctgatggcgcgagggaggc

SEQ ID NO: 3165 - DNA, 495 bp, Artificial Sequence
  source: /note="Description of Artificial Sequence: Synthetic polynucleotide"
gccttgccagcccgctcagacacacgtgtgtctactcttattttcataggctccatggatactggaattacccagacaccaaaatacctggtcacagcaatggggagtaaaaggacaatgaaacgtgagcatctgggacatgattctatgtattggtacagacagaaagctaagaaatccctggagttcatgttttactacaactgtaaggaattcattgaaaacaagactgtgccaaatcacttcacacctgaatgccctgacagctctcgcttataccttcatgtggtcgcactgcagcaagaagactcagctgcgtatctctgcaccagcagtgaacacacgtgtgtctacgtcgacagatacgcagtattttggcccaggcacccggctgacagtgctcggtaagcgggggctcccgctgaagccccggaactggggagggggcgccccgggacgcacacacgtgtgtctacctgatggcgcgagggaggc

SEQ ID NO: 3166 - DNA, 495 bp, Artificial Sequence
  source: /note="Description of Artificial Sequence: Synthetic polynucleotide"
gccttgccagcccgctcagacacacgtgtacagtgtcttattttcataggctccatggatactggaattacccagacaccaaaatacctggtcacagcaatggggagtaaaaggacaatgaaacgtgagcatctgggacatgattctatgtattggtacagacagaaagctaagaaatccctggagttcatgttttactacaactgtaaggaattcattgaaaacaagactgtgccaaatcacttcacacctgaatgccctgacagctctcgcttataccttcatgtggtcgcactgcagcaagaagactcagctgcgtatctctgcaccagcagtgaacacacgtgtacagtggtcgacaaaacattcagtacttcggcgccgggacccggctctcagtgctgggtaagctggggccgccgggggaccggggacgagactgcgctcgggtttttgtgcgacacacgtgtacagtgctgatggcgcgagggaggc

SEQ ID NO: 3167 - DNA, 495 bp, Artificial Sequence
  source: /note="Description of Artificial Sequence: Synthetic polynucleotide"
gccttgccagcccgctcagacacacgtggatcatctcttattttcataggctccatggatactggaattacccagacaccaaaatacctggtcacagcaatggggagtaaaaggacaatgaaacgtgagcatctgggacatgattctatgtattggtacagacagaaagctaagaaatccctggagttcatgttttactacaactgtaaggaattcattgaaaacaagactgtgccaaatcacttcacacctgaatgccctgacagctctcgcttataccttcatgtggtcgcactgcagcaagaagactcagctgcgtatctctgcaccagcagtgaacacacgtggatcatcgtcgacgagacccagtacttcgggccaggcacgcggctcctggtgctcggtgagcgcgggctgctggggcgcgggcgcgggcggcttgggtctggtttttgcggggacacacgtggatcatcctgatggcgcgagggaggc

SEQ ID NO: 3168 - DNA, 495 bp, Artificial Sequence
  source: /note="Description of Artificial Sequence: Synthetic polynucleotide"
gccttgccagcccgctcagacacacgttattggcgtcttattttcataggctccatggatactggaattacccagacaccaaaatacctggtcacagcaatggggagtaaaaggacaatgaaacgtgagcatctgggacatgattctatgtattggtacagacagaaagctaagaaatccctggagttcatgttttactacaactgtaaggaattcattgaaaacaagactgtgccaaatcacttcacacctgaatgccctgacagctctcgcttataccttcatgtggtcgcactgcagcaagaagactcagctgcgtatctctgcaccagcagtgaacacacgttattggcggtcgacgggccaacgtcctgactttcggggccggcagcaggctgaccgtgctgggtgagttttcgcgggaccacccgggcggcgggattcaggtggaaggcggcggacacacgttattggcgctgatggcgcgagggaggc

SEQ ID NO: 3169 - DNA, 495 bp, Artificial Sequence
  source: /note="Description of Artificial Sequence: Synthetic polynucleotide"
gccttgccagcccgctcagacacacgtaggcttgatcttattttcataggctccatggatactggaattacccagacaccaaaatacctggtcacagcaatggggagtaaaaggacaatgaaacgtgagcatctgggacatgattctatgtattggtacagacagaaagctaagaaatccctggagttcatgttttactacaactgtaaggaattcattgaaaacaagactgtgccaaatcacttcacacctgaatgccctgacagctctcgcttataccttcatgtggtcgcactgcagcaagaagactcagctgcgtatctctgcaccagcagtgaacacacgtaggcttgagtcgacacgagcagtacttcgggccgggcaccaggctcacggtcacaggtgagattcgggcgtctccccaccttccagcccctcggtccccggagtcggagggtggacacacgtaggcttgactgatggcgcgagggaggc

SEQ ID NO: 3170 - DNA, 495 bp, Artificial Sequence
  source: /note="Description of Artificial Sequence: Synthetic polynucleotide"
gccttgccagcccgctcagtagacggagacactcttctcacaggactcacagaacctgaagtcacccagactcccagccatcaggtcacacagatgggacaggaagtgatcttgcgctgtgtccccatctctaatcacttatacttctattggtacagacaaatcttggggcagaaagtcgagtttctggtttccttttataataatgaaatctcagagaagtctgaaatattcgatgatcaattctcagttgaaaggcctgatggatcaaatttcactctgaagatccggtccacaaagctggaggactcagccatgtacttctgtgccagcagtgatagacggagacactctgtcgacactgaagctttctttggacaaggcaccagactcacagttgtaggtaagacatttttcaggttcttttgcagatccgtcacagggaaaagtgggtccacagtagacggagacactctctgatggcgcgagggaggc

SEQ ID NO: 3171 - DNA, 495 bp, Artificial Sequence
  source: /note="Description of Artificial Sequence: Synthetic polynucleotide"
gccttgccagcccgctcagtagacggattcggaactctcacaggactcacagaacctgaagtcacccagactcccagccatcaggtcacacagatgggacaggaagtgatcttgcgctgtgtccccatctctaatcacttatacttctattggtacagacaaatcttggggcagaaagtcgagtttctggtttccttttataataatgaaatctcagagaagtctgaaatattcgatgatcaattctcagttgaaaggcctgatggatcaaatttcactctgaagatccggtccacaaagctggaggactcagccatgtacttctgtgccagcagtgatagacggattcggaacgtcgactatggctacaccttcggttcggggaccaggttaaccgttgtaggtaaggctgggggtctctaggaggggtgcgatgagggaggactctgtcctgggaaattagacggattcggaacctgatggcgcgagggaggc

SEQ ID NO: 3172 - DNA, 495 bp, Artificial Sequence
  source: /note="Description of Artificial Sequence: Synthetic polynucleotide"
gccttgccagcccgctcagtagacggaaagtaacgtctcacaggactcacagaacctgaagtcacccagactcccagccatcaggtcacacagatgggacaggaagtgatcttgcgctgtgtccccatctctaatcacttatacttctattggtacagacaaatcttggggcagaaagtcgagtttctggtttccttttataataatgaaatctcagagaagtctgaaatattcgatgatcaattctcagttgaaaggcctgatggatcaaatttcactctgaagatccggtccacaaagctggaggactcagccatgtacttctgtgccagcagtgatagacggaaagtaacggtcgacgaaacaccatatattttggagagggaagttggctcactgttgtaggtgagtaagtcaaggctggacagctgggaacttgcaaaaaggggctggaatccagtagacggaaagtaacgctgatggcgcgagggaggc

SEQ ID NO: 3173 - DNA, 495 bp, Artificial Sequence
  source: /note="Description of Artificial Sequence: Synthetic polynucleotide"
gccttgccagcccgctcagtagacggagtctcctatctcacaggactcacagaacctgaagtcacccagactcccagccatcaggtcacacagatgggacaggaagtgatcttgcgctgtgtccccatctctaatcacttatacttctattggtacagacaaatcttggggcagaaagtcgagtttctggtttccttttataataatgaaatctcagagaagtctgaaatattcgatgatcaattctcagttgaaaggcctgatggatcaaatttcactctgaagatccggtccacaaagctggaggactcagccatgtacttctgtgccagcagtgatagacggagtctcctagtcgacaatgaaaaactgttttttggcagtggaacccagctctctgtcttgggtatgtaaaagacttctttcgggatagtgtatcataaggtcggagttccaggagtagacggagtctcctactgatggcgcgagggaggc

SEQ ID NO: 3174 - DNA, 495 bp, Artificial Sequence
  source: /note="Description of Artificial Sequence: Synthetic polynucleotide"
gccttgccagcccgctcagtagacggaagagtgtctctcacaggactcacagaacctgaagtcacccagactcccagccatcaggtcacacagatgggacaggaagtgatcttgcgctgtgtccccatctctaatcacttatacttctattggtacagacaaatcttggggcagaaagtcgagtttctggtttccttttataataatgaaatctcagagaagtctgaaatattcgatgatcaattctcagttgaaaggcctgatggatcaaatttcactctgaagatccggtccacaaagctggaggactcagccatgtacttctgtgccagcagtgatagacggaagagtgtcgtcgacatcagccccagcattttggtgatgggactcgactctccatcctaggtaagttgcagaatcagggtggtatggccattgtcccttgaaggcagagttctcttagacggaagagtgtcctgatggcgcgagggaggc

SEQ ID NO: 3175 - DNA, 495 bp, Artificial Sequence
  source: /note="Description of Artificial Sequence: Synthetic polynucleotide"
gccttgccagcccgctcagtagacggagttccgaatctcacaggactcacagaacctgaagtcacccagactcccagccatcaggtcacacagatgggacaggaagtgatcttgcgctgtgtccccatctctaatcacttatacttctattggtacagacaaatcttggggcagaaagtcgagtttctggtttccttttataataatgaaatctcagagaagtctgaaatattcgatgatcaattctcagttgaaaggcctgatggatcaaatttcactctgaagatccggtccacaaagctggaggactcagccatgtacttctgtgccagcagtgatagacggagttccgaagtcgacataattcacccctccactttgggaacgggaccaggctcactgtgacaggtatgggggctccactcttgactcgggggtgcctgggtttgactgcaatgattagacggagttccgaactgatggcgcgagggaggc

SEQ ID NO: 3176 - DNA, 495 bp, Artificial Sequence
  source: /note="Description of Artificial Sequence: Synthetic polynucleotide"
gccttgccagcccgctcagtagacggacgttactttctcacaggactcacagaacctgaagtcacccagactcccagccatcaggtcacacagatgggacaggaagtgatcttgcgctgtgtccccatctctaatcacttatacttctattggtacagacaaatcttggggcagaaagtcgagtttctggtttccttttataataatgaaatctcagagaagtctgaaatattcgatgatcaattctcagttgaaaggcctgatggatcaaatttcactctgaagatccggtccacaaagctggaggactcagccatgtacttctgtgccagcagtgatagacggacgttacttgtcgacacaatgagcagttcttcgggccagggacacggctcaccgtgctaggtaagaagggggctccaggtgggagagagggtgagcagcccagcctgcacgaccctagacggacgttacttctgatggcgcgagggaggc

SEQ ID NO: 3177 - DNA, 495 bp, Artificial Sequence
  source: /note="Description of Artificial Sequence: Synthetic polynucleotide"
gccttgccagcccgctcagtagacggataggagactctcacaggactcacagaacctgaagtcacccagactcccagccatcaggtcacacagatgggacaggaagtgatcttgcgctgtgtccccatctctaatcacttatacttctattggtacagacaaatcttggggcagaaagtcgagtttctggtttccttttataataatgaaatctcagagaagtctgaaatattcgatgatcaattctcagttgaaaggcctgatggatcaaatttcactctgaagatccggtccacaaagctggaggactcagccatgtacttctgtgccagcagtgatagacggataggagacgtcgacaccggggagctgttttttggagaaggctctaggctgaccgtactgggtaaggaggcggttggggctccggagagctccgagagggcgggatgggcagaggtagacggataggagacctgatggcgcgagggaggc

SEQ ID NO: 3178 - DNA, 495 bp, Artificial Sequence
  source: /note="Description of Artificial Sequence: Synthetic polynucleotide"
gccttgccagcccgctcagtagacggagtgtctactctcacaggactcacagaacctgaagtcacccagactcccagccatcaggtcacacagatgggacaggaagtgatcttgcgctgtgtccccatctctaatcacttatacttctattggtacagacaaatcttggggcagaaagtcgagtttctggtttccttttataataatgaaatctcagagaagtctgaaatattcgatgatcaattctcagttgaaaggcctgatggatcaaatttcactctgaagatccggtccacaaagctggaggactcagccatgtacttctgtgccagcagtgatagacggagtgtctacgtcgacagatacgcagtattttggcccaggcacccggctgacagtgctcggtaagcgggggctcccgctgaagccccggaactggggagggggcgccccgggacgctagacggagtgtctacctgatggcgcgagggaggc

SEQ ID NO: 3179 - DNA, 495 bp, Artificial Sequence
  source: /note="Description of Artificial Sequence: Synthetic polynucleotide"
gccttgccagcccgctcagtagacggagtacagtgtctcacaggactcacagaacctgaagtcacccagactcccagccatcaggtcacacagatgggacaggaagtgatcttgcgctgtgtccccatctctaatcacttatacttctattggtacagacaaatcttggggcagaaagtcgagtttctggtttccttttataataatgaaatctcagagaagtctgaaatattcgatgatcaattctcagttgaaaggcctgatggatcaaatttcactctgaagatccggtccacaaagctggaggactcagccatgtacttctgtgccagcagtgatagacggagtacagtggtcgacaaaacattcagtacttcggcgccgggacccggctctcagtgctgggtaagctggggccgccgggggaccggggacgagactgcgctcgggtttttgtgcgtagacggagtacagtgctgatggcgcgagggaggc

SEQ ID NO: 3180 - DNA, 495 bp, Artificial Sequence
  source: /note="Description of Artificial Sequence: Synthetic polynucleotide"
gccttgccagcccgctcagtagacggaggatcatctctcacaggactcacagaacctgaagtcacccagactcccagccatcaggtcacacagatgggacaggaagtgatcttgcgctgtgtccccatctctaatcacttatacttctattggtacagacaaatcttggggcagaaagtcgagtttctggtttccttttataataatgaaatctcagagaagtctgaaatattcgatgatcaattctcagttgaaaggcctgatggatcaaatttcactctgaagatccggtccacaaagctggaggactcagccatgtacttctgtgccagcagtgatagacggaggatcatcgtcgacgagacccagtacttcgggccaggcacgcggctcctggtgctcggtgagcgcgggctgctggggcgcgggcgcgggcggcttgggtctggtttttgcggggtagacggaggatcatcctgatggcgcgagggaggc

SEQ ID NO: 3181 - DNA, 495 bp, Artificial Sequence
  source: /note="Description of Artificial Sequence: Synthetic polynucleotide"
gccttgccagcccgctcagtagacggatattggcgtctcacaggactcacagaacctgaagtcacccagactcccagccatcaggtcacacagatgggacaggaagtgatcttgcgctgtgtccccatctctaatcacttatacttctattggtacagacaaatcttggggcagaaagtcgagtttctggtttccttttataataatgaaatctcagagaagtctgaaatattcgatgatcaattctcagttgaaaggcctgatggatcaaatttcactctgaagatccggtccacaaagctggaggactcagccatgtacttctgtgccagcagtgatagacggatattggcggtcgacgggccaacgtcctgactttcggggccggcagcaggctgaccgtgctgggtgagttttcgcgggaccacccgggcggcgggattcaggtggaaggcggcggtagacggatattggcgctgatggcgcgagggaggc

SEQ ID NO: 3182 - DNA, 495 bp, Artificial Sequence
  source: /note="Description of Artificial Sequence: Synthetic polynucleotide"
gccttgccagcccgctcagtagacggaaggcttgatctcacaggactcacagaacctgaagtcacccagactcccagccatcaggtcacacagatgggacaggaagtgatcttgcgctgtgtccccatctctaatcacttatacttctattggtacagacaaatcttggggcagaaagtcgagtttctggtttccttttataataatgaaatctcagagaagtctgaaatattcgatgatcaattctcagttgaaaggcctgatggatcaaatttcactctgaagatccggtccacaaagctggaggactcagccatgtacttctgtgccagcagtgatagacggaaggcttgagtcgacacgagcagtacttcgggccgggcaccaggctcacggtcacaggtgagattcgggcgtctccccaccttccagcccctcggtccccggagtcggagggtggtagacggaaggcttgactgatggcgcgagggaggc

SEQ ID NO: 3183 - DNA, 495 bp, Artificial Sequence
  source: /note="Description of Artificial Sequence: Synthetic polynucleotide"
gccttgccagcccgctcagcagctcttgacactctttcctttgcaggtcccttggacacagctgtttcccagactccaaaatacctggtcacacagatgggaaacgacaagtccattaaatgtgaacaaaatctgggccatgatactatgtattggtataaacaggactctaagaaatttctgaagataatgtttagctacaataataaggagctcattataaatgaaacagttccaaatcgcttctcacctaaatctccagacaaagctcacttaaatcttcacatcaattccctggagcttggtgactctgctgtgtatttctgtgccagcagtgacagctcttgacactctgtcgacactgaagctttctttggacaaggcaccagactcacagttgtaggtaagacatttttcaggttcttttgcagatccgtcacagggaaaagtgggtccacagcagctcttgacactctctgatggcgcgagggaggc

SEQ ID NO: 3184 - DNA, 495 bp, Artificial Sequence
  source: /note="Description of Artificial Sequence: Synthetic polynucleotide"
gccttgccagcccgctcagcagctcttttcggaacttcctttgcaggtcccttggacacagctgtttcccagactccaaaatacctggtcacacagatgggaaacgacaagtccattaaatgtgaacaaaatctgggccatgatactatgtattggtataaacaggactctaagaaatttctgaagataatgtttagctacaataataaggagctcattataaatgaaacagttccaaatcgcttctcacctaaatctccagacaaagctcacttaaatcttcacatcaattccctggagcttggtgactctgctgtgtatttctgtgccagcagtgacagctcttttcggaacgtcgactatggctacaccttcggttcggggaccaggttaaccgttgtaggtaaggctgggggtctctaggaggggtgcgatgagggaggactctgtcctgggaaatcagctcttttcggaacctgatggcgcgagggaggc

SEQ ID NO: 3185 - DNA, 495 bp, Artificial Sequence
  source: /note="Description of Artificial Sequence: Synthetic polynucleotide"
gccttgccagcccgctcagcagctcttaagtaacgttcctttgcaggtcccttggacacagctgtttcccagactccaaaatacctggtcacacagatgggaaacgacaagtccattaaatgtgaacaaaatctgggccatgatactatgtattggtataaacaggactctaagaaatttctgaagataatgtttagctacaataataaggagctcattataaatgaaacagttccaaatcgcttctcacctaaatctccagacaaagctcacttaaatcttcacatcaattccctggagcttggtgactctgctgtgtatttctgtgccagcagtgacagctcttaagtaacggtcgacgaaacaccatatattttggagagggaagttggctcactgttgtaggtgagtaagtcaaggctggacagctgggaacttgcaaaaaggggctggaatccagcagctcttaagtaacgctgatggcgcgagggaggc

SEQ ID NO: 3186 - DNA, 495 bp, Artificial Sequence
  source: /note="Description of Artificial Sequence: Synthetic polynucleotide"
gccttgccagcccgctcagcagctcttgtctcctattcctttgcaggtcccttggacacagctgtttcccagactccaaaatacctggtcacacagatgggaaacgacaagtccattaaatgtgaacaaaatctgggccatgatactatgtattggtataaacaggactctaagaaatttctgaagataatgtttagctacaataataaggagctcattataaatgaaacagttccaaatcgcttctcacctaaatctccagacaaagctcacttaaatcttcacatcaattccctggagcttggtgactctgctgtgtatttctgtgccagcagtgacagctcttgtctcctagtcgacaatgaaaaactgttttttggcagtggaacccagctctctgtcttgggtatgtaaaagacttctttcgggatagtgtatcataaggtcggagttccaggagcagctcttgtctcctactgatggcgcgagggaggc

SEQ ID NO: 3187 - DNA, 495 bp, Artificial Sequence
  source: /note="Description of Artificial Sequence: Synthetic polynucleotide"
gccttgccagcccgctcagcagctcttagagtgtcttcctttgcaggtcccttggacacagctgtttcccagactccaaaatacctggtcacacagatgggaaacgacaagtccattaaatgtgaacaaaatctgggccatgatactatgtattggtataaacaggactctaagaaatttctgaagataatgtttagctacaataataaggagctcattataaatgaaacagttccaaatcgcttctcacctaaatctccagacaaagctcacttaaatcttcacatcaattccctggagcttggtgactctgctgtgtatttctgtgccagcagtgacagctcttagagtgtcgtcgacatcagccccagcattttggtgatgggactcgactctccatcctaggtaagttgcagaatcagggtggtatggccattgtcccttgaaggcagagttctctcagctcttagagtgtcctgatggcgcgagggaggc

SEQ ID NO: 3188 - DNA, 495 bp, Artificial Sequence
  source: /note="Description of Artificial Sequence: Synthetic polynucleotide"
gccttgccagcccgctcagcagctcttgttccgaattcctttgcaggtcccttggacacagctgtttcccagactccaaaatacctggtcacacagatgggaaacgacaagtccattaaatgtgaacaaaatctgggccatgatactatgtattggtataaacaggactctaagaaatttctgaagataatgtttagctacaataataaggagctcattataaatgaaacagttccaaatcgcttctcacctaaatctccagacaaagctcacttaaatcttcacatcaattccctggagcttggtgactctgctgtgtatttctgtgccagcagtgacagctcttgttccgaagtcgacataattcacccctccactttgggaacgggaccaggctcactgtgacaggtatgggggctccactcttgactcgggggtgcctgggtttgactgcaatgatcagctcttgttccgaactgatggcgcgagggaggc

SEQ ID NO: 3189 - DNA, 495 bp, Artificial Sequence
  source: /note="Description of Artificial Sequence: Synthetic polynucleotide"
gccttgccagcccgctcagcagctcttcgttacttttcctttgcaggtcccttggacacagctgtttcccagactccaaaatacctggtcacacagatgggaaacgacaagtccattaaatgtgaacaaaatctgggccatgatactatgtattggtataaacaggactctaagaaatttctgaagataatgtttagctacaataataaggagctcattataaatgaaacagttccaaatcgcttctcacctaaatctccagacaaagctcacttaaatcttcacatcaattccctggagcttggtgactctgctgtgtatttctgtgccagcagtgacagctcttcgttacttgtcgacacaatgagcagttcttcgggccagggacacggctcaccgtgctaggtaagaagggggctccaggtgggagagagggtgagcagcccagcctgcacgaccccagctcttcgttacttctgatggcgcgagggaggc

SEQ ID NO: 3190 - DNA, 495 bp, Artificial Sequence
  source: /note="Description of Artificial Sequence: Synthetic polynucleotide"
gccttgccagcccgctcagcagctctttaggagacttcctttgcaggtcccttggacacagctgtttcccagactccaaaatacctggtcacacagatgggaaacgacaagtccattaaatgtgaacaaaatctgggccatgatactatgtattggtataaacaggactctaagaaatttctgaagataatgtttagctacaataataaggagctcattataaatgaaacagttccaaatcgcttctcacctaaatctccagacaaagctcacttaaatcttcacatcaattccctggagcttggtgactctgctgtgtatttctgtgccagcagtgacagctctttaggagacgtcgacaccggggagctgttttttggagaaggctctaggctgaccgtactgggtaaggaggcggttggggctccggagagctccgagagggcgggatgggcagaggcagctctttaggagacctgatggcgcgagggaggc

SEQ ID NO: 3191 - DNA, 495 bp, Artificial Sequence
  source: /note="Description of Artificial Sequence: Synthetic polynucleotide"
gccttgccagcccgctcagcagctcttgtgtctacttcctttgcaggtcccttggacacagctgtttcccagactccaaaatacctggtcacacagatgggaaacgacaagtccattaaatgtgaacaaaatctgggccatgatactatgtattggtataaacaggactctaagaaatttctgaagataatgtttagctacaataataaggagctcattataaatgaaacagttccaaatcgcttctcacctaaatctccagacaaagctcacttaaatcttcacatcaattccctggagcttggtgactctgctgtgtatttctgtgccagcagtgacagctcttgtgtctacgtcgacagatacgcagtattttggcccaggcacccggctgacagtgctcggtaagcgggggctcccgctgaagccccggaactggggagggggcgccccgggacgccagctcttgtgtctacctgatggcgcgagggaggc

SEQ ID NO: 3192 - DNA, 495 bp, Artificial Sequence
  source: /note="Description of Artificial Sequence: Synthetic polynucleotide"
gccttgccagcccgctcagcagctcttgtacagtgttcctttgcaggtcccttggacacagctgtttcccagactccaaaatacctggtcacacagatgggaaacgacaagtccattaaatgtgaacaaaatctgggccatgatactatgtattggtataaacaggactctaagaaatttctgaagataatgtttagctacaataataaggagctcattataaatgaaacagttccaaatcgcttctcacctaaatctccagacaaagctcacttaaatcttcacatcaattccctggagcttggtgactctgctgtgtatttctgtgccagcagtgacagctcttgtacagtggtcgacaaaacattcagtacttcggcgccgggacccggctctcagtgctgggtaagctggggccgccgggggaccggggacgagactgcgctcgggtttttgtgcgcagctcttgtacagtgctgatggcgcgagggaggc

SEQ ID NO: 3193 - DNA, 495 bp, Artificial Sequence
  source: /note="Description of Artificial Sequence: Synthetic polynucleotide"
gccttgccagcccgctcagcagctcttggatcatcttcctttgcaggtcccttggacacagctgtttcccagactccaaaatacctggtcacacagatgggaaacgacaagtccattaaatgtgaacaaaatctgggccatgatactatgtattggtataaacaggactctaagaaatttctgaagataatgtttagctacaataataaggagctcattataaatgaaacagttccaaatcgcttctcacctaaatctccagacaaagctcacttaaatcttcacatcaattccctggagcttggtgactctgctgtgtatttctgtgccagcagtgacagctcttggatcatcgtcgacgagacccagtacttcgggccaggcacgcggctcctggtgctcggtgagcgcgggctgctggggcgcgggcgcgggcggcttgggtctggtttttgcggggcagctcttggatcatcctgatggcgcgagggaggc

SEQ ID NO: 3194 - DNA, 495 bp, Artificial Sequence
  source: /note="Description of Artificial Sequence: Synthetic polynucleotide"
gccttgccagcccgctcagcagctctttattggcgttcctttgcaggtcccttggacacagctgtttcccagactccaaaatacctggtcacacagatgggaaacgacaagtccattaaatgtgaacaaaatctgggccatgatactatgtattggtataaacaggactctaagaaatttctgaagataatgtttagctacaataataaggagctcattataaatgaaacagttccaaatcgcttctcacctaaatctccagacaaagctcacttaaatcttcacatcaattccctggagcttggtgactctgctgtgtatttctgtgccagcagtgacagctctttattggcggtcgacgggccaacgtcctgactttcggggccggcagcaggctgaccgtgctgggtgagttttcgcgggaccacccgggcggcgggattcaggtggaaggcggcggcagctctttattggcgctgatggcgcgagggaggc

SEQ ID NO: 3195 - DNA, 495 bp, Artificial Sequence
  source: /note="Description of Artificial Sequence: Synthetic polynucleotide"
gccttgccagcccgctcagcagctcttaggcttgattcctttgcaggtcccttggacacagctgtttcccagactccaaaatacctggtcacacagatgggaaacgacaagtccattaaatgtgaacaaaatctgggccatgatactatgtattggtataaacaggactctaagaaatttctgaagataatgtttagctacaataataaggagctcattataaatgaaacagttccaaatcgcttctcacctaaatctccagacaaagctcacttaaatcttcacatcaattccctggagcttggtgactctgctgtgtatttctgtgccagcagtgacagctcttaggcttgagtcgacacgagcagtacttcgggccgggcaccaggctcacggtcacaggtgagattcgggcgtctccccaccttccagcccctcggtccccggagtcggagggtggcagctcttaggcttgactgatggcgcgagggaggc

SEQ ID NO: 3196 - DNA, 495 bp, Artificial Sequence
  source: /note="Description of Artificial Sequence: Synthetic polynucleotide"
gccttgccagcccgctcaggagcgatagacactctttcctttacagatccactggacacagccgtttcccagactccaaaatacctggtcacacagatgggaaaaaaggagtctcttaaatgagaacaaaatctgggccataatgctatgtattggtataaacaggactctaagaaatttctgaagacaatgtttatctacagtaacaaggagccaattttaaatgaaacagttccaaatcgcttctcacctgactctccagacaaagctcatttaaatcttcacatcaattccctggagcttggtgactctgctgtgtatttctgtgccagcagtgagagcgatagacactctgtcgacactgaagctttctttggacaaggcaccagactcacagttgtaggtaagacatttttcaggttcttttgcagatccgtcacagggaaaagtgggtccacaggagcgatagacactctctgatggcgcgagggaggc

SEQ ID NO: 3197 - DNA, 495 bp, Artificial Sequence
  source: /note="Description of Artificial Sequence: Synthetic polynucleotide"
gccttgccagcccgctcaggagcgatattcggaacttcctttacagatccactggacacagccgtttcccagactccaaaatacctggtcacacagatgggaaaaaaggagtctcttaaatgagaacaaaatctgggccataatgctatgtattggtataaacaggactctaagaaatttctgaagacaatgtttatctacagtaacaaggagccaattttaaatgaaacagttccaaatcgcttctcacctgactctccagacaaagctcatttaaatcttcacatcaattccctggagcttggtgactctgctgtgtatttctgtgccagcagtgagagcgatattcggaacgtcgactatggctacaccttcggttcggggaccaggttaaccgttgtaggtaaggctgggggtctctaggaggggtgcgatgagggaggactctgtcctgggaaatgagcgatattcggaacctgatggcgcgagggaggc

SEQ ID NO: 3198 - DNA, 495 bp, Artificial Sequence
  source: /note="Description of Artificial Sequence: Synthetic polynucleotide"
gccttgccagcccgctcaggagcgataaagtaacgttcctttacagatccactggacacagccgtttcccagactccaaaatacctggtcacacagatgggaaaaaaggagtctcttaaatgagaacaaaatctgggccataatgctatgtattggtataaacaggactctaagaaatttctgaagacaatgtttatctacagtaacaaggagccaattttaaatgaaacagttccaaatcgcttctcacctgactctccagacaaagctcatttaaatcttcacatcaattccctggagcttggtgactctgctgtgtatttctgtgccagcagtgagagcgataaagtaacggtcgacgaaacaccatatattttggagagggaagttggctcactgttgtaggtgagtaagtcaaggctggacagctgggaacttgcaaaaaggggctggaatccaggagcgataaagtaacgctgatggcgcgagggaggc

SEQ ID NO: 3199 - DNA, 495 bp, Artificial Sequence
  source: /note="Description of Artificial Sequence: Synthetic polynucleotide"
gccttgccagcccgctcaggagcgatagtctcctattcctttacagatccactggacacagccgtttcccagactccaaaatacctggtcacacagatgggaaaaaaggagtctcttaaatgagaacaaaatctgggccataatgctatgtattggtataaacaggactctaagaaatttctgaagacaatgtttatctacagtaacaaggagccaattttaaatgaaacagttccaaatcgcttctcacctgactctccagacaaagctcatttaaatcttcacatcaattccctggagcttggtgactctgctgtgtatttctgtgccagcagtgagagcgatagtctcctagtcgacaatgaaaaactgttttttggcagtggaacccagctctctgtcttgggtatgtaaaagacttctttcgggatagtgtatcataaggtcggagttccaggaggagcgatagtctcctactgatggcgcgagggaggc

SEQ ID NO: 3200 - DNA, 495 bp, Artificial Sequence
  source: /note="Description of Artificial Sequence: Synthetic polynucleotide"
gccttgccagcccgctcaggagcgataagagtgtcttcctttacagatccactggacacagccgtttcccagactccaaaatacctggtcacacagatgggaaaaaaggagtctcttaaatgagaacaaaatctgggccataatgctatgtattggtataaacaggactctaagaaatttctgaagacaatgtttatctacagtaacaaggagccaattttaaatgaaacagttccaaatcgcttctcacctgactctccagacaaagctcatttaaatcttcacatcaattccctggagcttggtgactctgctgtgtatttctgtgccagcagtgagagcgataagagtgtcgtcgacatcagccccagcattttggtgatgggactcgactctccatcctaggtaagttgcagaatcagggtggtatggccattgtcccttgaaggcagagttctctgagcgataagagtgtcctgatggcgcgagggaggc

SEQ ID NO: 3201 - DNA, 495 bp, Artificial Sequence
  source: /note="Description of Artificial Sequence: Synthetic polynucleotide"
gccttgccagcccgctcaggagcgatagttccgaattcctttacagatccactggacacagccgtttcccagactccaaaatacctggtcacacagatgggaaaaaaggagtctcttaaatgagaacaaaatctgggccataatgctatgtattggtataaacaggactctaagaaatttctgaagacaatgtttatctacagtaacaaggagccaattttaaatgaaacagttccaaatcgcttctcacctgactctccagacaaagctcatttaaatcttcacatcaattccctggagcttggtgactctgctgtgtatttctgtgccagcagtgagagcgatagttccgaagtcgacataattcacccctccactttgggaacgggaccaggctcactgtgacaggtatgggggctccactcttgactcgggggtgcctgggtttgactgcaatgatgagcgatagttccgaactgatggcgcgagggaggc

SEQ ID NO: 3202 - DNA, 495 bp, Artificial Sequence
  source: /note="Description of Artificial Sequence: Synthetic polynucleotide"
gccttgccagcccgctcaggagcgatacgttacttttcctttacagatccactggacacagccgtttcccagactccaaaatacctggtcacacagatgggaaaaaaggagtctcttaaatgagaacaaaatctgggccataatgctatgtattggtataaacaggactctaagaaatttctgaagacaatgtttatctacagtaacaaggagccaattttaaatgaaacagttccaaatcgcttctcacctgactctccagacaaagctcatttaaatcttcacatcaattccctggagcttggtgactctgctgtgtatttctgtgccagcagtgagagcgatacgttacttgtcgacacaatgagcagttcttcgggccagggacacggctcaccgtgctaggtaagaagggggctccaggtgggagagagggtgagcagcccagcctgcacgacccgagcgatacgttacttctgatggcgcgagggaggc

SEQ ID NO: 3203 - DNA, 495 bp, Artificial Sequence
  source: /note="Description of Artificial Sequence: Synthetic polynucleotide"
gccttgccagcccgctcaggagcgatataggagacttcctttacagatccactggacacagccgtttcccagactccaaaatacctggtcacacagatgggaaaaaaggagtctcttaaatgagaacaaaatctgggccataatgctatgtattggtataaacaggactctaagaaatttctgaagacaatgtttatctacagtaacaaggagccaattttaaatgaaacagttccaaatcgcttctcacctgactctccagacaaagctcatttaaatcttcacatcaattccctggagcttggtgactctgctgtgtatttctgtgccagcagtgagagcgatataggagacgtcgacaccggggagctgttttttggagaaggctctaggctgaccgtactgggtaaggaggcggttggggctccggagagctccgagagggcgggatgggcagagggagcgatataggagacctgatggcgcgagggaggc

SEQ ID NO: 3204 - DNA, 495 bp, Artificial Sequence
  source: /note="Description of Artificial Sequence: Synthetic polynucleotide"
gccttgccagcccgctcaggagcgatagtgtctacttcctttacagatccactggacacagccgtttcccagactccaaaatacctggtcacacagatgggaaaaaaggagtctcttaaatgagaacaaaatctgggccataatgctatgtattggtataaacaggactctaagaaatttctgaagacaatgtttatctacagtaacaaggagccaattttaaatgaaacagttccaaatcgcttctcacctgactctccagacaaagctcatttaaatcttcacatcaattccctggagcttggtgactctgctgtgtatttctgtgccagcagtgagagcgatagtgtctacgtcgacagatacgcagtattttggcccaggcacccggctgacagtgctcggtaagcgggggctcccgctgaagccccggaactggggagggggcgccccgggacgcgagcgatagtgtctacctgatggcgcgagggaggc

SEQ ID NO: 3205 - DNA, 495 bp, Artificial Sequence
  source: /note="Description of Artificial Sequence: Synthetic polynucleotide"
gccttgccagcccgctcaggagcgatagtacagtgttcctttacagatccactggacacagccgtttcccagactccaaaatacctggtcacacagatgggaaaaaaggagtctcttaaatgagaacaaaatctgggccataatgctatgtattggtataaacaggactctaagaaatttctgaagacaatgtttatctacagtaacaaggagccaattttaaatgaaacagttccaaatcgcttctcacctgactctccagacaaagctcatttaaatcttcacatcaattccctggagcttggtgactctgctgtgtatttctgtgccagcagtgagagcgatagtacagtggtcgacaaaacattcagtacttcggcgccgggacccggctctcagtgctgggtaagctggggccgccgggggaccggggacgagactgcgctcgggtttttgtgcggagcgatagtacagtgctgatggcgcgagggaggc

SEQ ID NO: 3206 - DNA, 495 bp, Artificial Sequence
  source: /note="Description of Artificial Sequence: Synthetic polynucleotide"
gccttgccagcccgctcaggagcgataggatcatcttcctttacagatccactggacacagccgtttcccagactccaaaatacctggtcacacagatgggaaaaaaggagtctcttaaatgagaacaaaatctgggccataatgctatgtattggtataaacaggactctaagaaatttctgaagacaatgtttatctacagtaacaaggagccaattttaaatgaaacagttccaaatcgcttctcacctgactctccagacaaagctcatttaaatcttcacatcaattccctggagcttggtgactctgctgtgtatttctgtgccagcagtgagagcgataggatcatcgtcgacgagacccagtacttcgggccaggcacgcggctcctggtgctcggtgagcgcgggctgctggggcgcgggcgcgggcggcttgggtctggtttttgcgggggagcgataggatcatcctgatggcgcgagggaggc

SEQ ID NO: 3207 - DNA, 495 bp, Artificial Sequence
  source: /note="Description of Artificial Sequence: Synthetic polynucleotide"
gccttgccagcccgctcaggagcgatatattggcgttcctttacagatccactggacacagccgtttcccagactccaaaatacctggtcacacagatgggaaaaaaggagtctcttaaatgagaacaaaatctgggccataatgctatgtattggtataaacaggactctaagaaatttctgaagacaatgtttatctacagtaacaaggagccaattttaaatgaaacagttccaaatcgcttctcacctgactctccagacaaagctcatttaaatcttcacatcaattccctggagcttggtgactctgctgtgtatttctgtgccagcagtgagagcgatatattggcggtcgacgggccaacgtcctgactttcggggccggcagcaggctgaccgtgctgggtgagttttcgcgggaccacccgggcggcgggattcaggtggaaggcggcgggagcgatatattggcgctgatggcgcgagggaggc

SEQ ID NO: 3208 - DNA, 495 bp, Artificial Sequence
  source: /note="Description of Artificial Sequence: Synthetic polynucleotide"
gccttgccagcccgctcaggagcgataaggcttgattcctttacagatccactggacacagccgtttcccagactccaaaatacctggtcacacagatgggaaaaaaggagtctcttaaatgagaacaaaatctgggccataatgctatgtattggtataaacaggactctaagaaatttctgaagacaatgtttatctacagtaacaaggagccaattttaaatgaaacagttccaaatcgcttctcacctgactctccagacaaagctcatttaaatcttcacatcaattccctggagcttggtgactctgctgtgtatttctgtgccagcagtgagagcgataaggcttgagtcgacacgagcagtacttcgggccgggcaccaggctcacggtcacaggtgagattcgggcgtctccccaccttccagcccctcggtccccggagtcggagggtgggagcgataaggcttgactgatggcgcgagggaggc

SEQ ID NO: 3209 - DNA, 495 bp, Artificial Sequence
  source: /note="Description of Artificial Sequence: Synthetic polynucleotide"
gccttgccagcccgctcaggcatctgagacactcttcctcctacagttcccatagacactgaagttacccagacaccaaaacacctggtcatgggaatgacaaataagaagtctttgaaatgtgaacaacatatggggcacagggctatgtattggtacaagcagaaagctaagaagccaccggagctcatgtttgtctacagctatgagaaactctctataaatgaaagtgtgccaagtcgcttctcacctgaatgccccaacagctctctcttaaaccttcacctacacgccctgcagccagaagactcagccctgtatctctgcgccagcagtgagcatctgagacactctgtcgacactgaagctttctttggacaaggcaccagactcacagttgtaggtaagacatttttcaggttcttttgcagatccgtcacagggaaaagtgggtccacaggcatctgagacactctctgatggcgcgagggaggc

SEQ ID NO: 3210 - DNA, 495 bp, Artificial Sequence
  source: /note="Description of Artificial Sequence: Synthetic polynucleotide"
gccttgccagcccgctcaggcatctgattcggaactcctcctacagttcccatagacactgaagttacccagacaccaaaacacctggtcatgggaatgacaaataagaagtctttgaaatgtgaacaacatatggggcacagggctatgtattggtacaagcagaaagctaagaagccaccggagctcatgtttgtctacagctatgagaaactctctataaatgaaagtgtgccaagtcgcttctcacctgaatgccccaacagctctctcttaaaccttcacctacacgccctgcagccagaagactcagccctgtatctctgcgccagcagtgagcatctgattcggaacgtcgactatggctacaccttcggttcggggaccaggttaaccgttgtaggtaaggctgggggtctctaggaggggtgcgatgagggaggactctgtcctgggaaatgcatctgattcggaacctgatggcgcgagggaggc

SEQ ID NO: 3211 - DNA, 495 bp, Artificial Sequence
  source: /note="Description of Artificial Sequence: Synthetic polynucleotide"
gccttgccagcccgctcaggcatctgaaagtaacgtcctcctacagttcccatagacactgaagttacccagacaccaaaacacctggtcatgggaatgacaaataagaagtctttgaaatgtgaacaacatatggggcacagggctatgtattggtacaagcagaaagctaagaagccaccggagctcatgtttgtctacagctatgagaaactctctataaatgaaagtgtgccaagtcgcttctcacctgaatgccccaacagctctctcttaaaccttcacctacacgccctgcagccagaagactcagccctgtatctctgcgccagcagtgagcatctgaaagtaacggtcgacgaaacaccatatattttggagagggaagttggctcactgttgtaggtgagtaagtcaaggctggacagctgggaacttgcaaaaaggggctggaatccaggcatctgaaagtaacgctgatggcgcgagggaggc

SEQ ID NO: 3212 - DNA, 495 bp, Artificial Sequence
  source: /note="Description of Artificial Sequence: Synthetic polynucleotide"
gccttgccagcccgctcaggcatctgagtctcctatcctcctacagttcccatagacactgaagttacccagacaccaaaacacctggtcatgggaatgacaaataagaagtctttgaaatgtgaacaacatatggggcacagggctatgtattggtacaagcagaaagctaagaagccaccggagctcatgtttgtctacagctatgagaaactctctataaatgaaagtgtgccaagtcgcttctcacctgaatgccccaacagctctctcttaaaccttcacctacacgccctgcagccagaagactcagccctgtatctctgcgccagcagtgagcatctgagtctcctagtcgacaatgaaaaactgttttttggcagtggaacccagctctctgtcttgggtatgtaaaagacttctttcgggatagtgtatcataaggtcggagttccaggaggcatctgagtctcctactgatggcgcgagggaggc

SEQ ID NO: 3213 - DNA, 495 bp, Artificial Sequence
  source: /note="Description of Artificial Sequence: Synthetic polynucleotide"
gccttgccagcccgctcaggcatctgaagagtgtctcctcctacagttcccatagacactgaagttacccagacaccaaaacacctggtcatgggaatgacaaataagaagtctttgaaatgtgaacaacatatggggcacagggctatgtattggtacaagcagaaagctaagaagccaccggagctcatgtttgtctacagctatgagaaactctctataaatgaaagtgtgccaagtcgcttctcacctgaatgccccaacagctctctcttaaaccttcacctacacgccctgcagccagaagactcagccctgtatctctgcgccagcagtgagcatctgaagagtgtcgtcgacatcagccccagcattttggtgatgggactcgactctccatcctaggtaagttgcagaatcagggtggtatggccattgtcccttgaaggcagagttctctgcatctgaagagtgtcctgatggcgcgagggaggc

SEQ ID NO: 3214 - DNA, 495 bp, Artificial Sequence
  source: /note="Description of Artificial Sequence: Synthetic polynucleotide"
gccttgccagcccgctcaggcatctgagttccgaatcctcctacagttcccatagacactgaagttacccagacaccaaaacacctggtcatgggaatgacaaataagaagtctttgaaatgtgaacaacatatggggcacagggctatgtattggtacaagcagaaagctaagaagccaccggagctcatgtttgtctacagctatgagaaactctctataaatgaaagtgtgccaagtcgcttctcacctgaatgccccaacagctctctcttaaaccttcacctacacgccctgcagccagaagactcagccctgtatctctgcgccagcagtgagcatctgagttccgaagtcgacataattcacccctccactttgggaacgggaccaggctcactgtgacaggtatgggggctccactcttgactcgggggtgcctgggtttgactgcaatgatgcatctgagttccgaactgatggcgcgagggaggc

SEQ ID NO: 3215 - DNA, 495 bp, Artificial Sequence
  source: /note="Description of Artificial Sequence: Synthetic polynucleotide"
gccttgccagcccgctcaggcatctgacgttactttcctcctacagttcccatagacactgaagttacccagacaccaaaacacctggtcatgggaatgacaaataagaagtctttgaaatgtgaacaacatatggggcacagggctatgtattggtacaagcagaaagctaagaagccaccggagctcatgtttgtctacagctatgagaaactctctataaatgaaagtgtgccaagtcgcttctcacctgaatgccccaacagctctctcttaaaccttcacctacacgccctgcagccagaagactcagccctgtatctctgcgccagcagtgagcatctgacgttacttgtcgacacaatgagcagttcttcgggccagggacacggctcaccgtgctaggtaagaagggggctccaggtgggagagagggtgagcagcccagcctgcacgacccgcatctgacgttacttctgatggcgcgagggaggc

SEQ ID NO: 3216 - DNA, 495 bp, Artificial Sequence
  source: /note="Description of Artificial Sequence: Synthetic polynucleotide"
gccttgccagcccgctcaggcatctgataggagactcctcctacagttcccatagacactgaagttacccagacaccaaaacacctggtcatgggaatgacaaataagaagtctttgaaatgtgaacaacatatggggcacagggctatgtattggtacaagcagaaagctaagaagccaccggagctcatgtttgtctacagctatgagaaactctctataaatgaaagtgtgccaagtcgcttctcacctgaatgccccaacagctctctcttaaaccttcacctacacgccctgcagccagaagactcagccctgtatctctgcgccagcagtgagcatctgataggagacgtcgacaccggggagctgttttttggagaaggctctaggctgaccgtactgggtaaggaggcggttggggctccggagagctccgagagggcgggatgggcagagggcatctgataggagacctgatggcgcgagggaggc

SEQ ID NO: 3217 - DNA, 495 bp, Artificial Sequence
  source: /note="Description of Artificial Sequence: Synthetic polynucleotide"
gccttgccagcccgctcaggcatctgagtgtctactcctcctacagttcccatagacactgaagttacccagacaccaaaacacctggtcatgggaatgacaaataagaagtctttgaaatgtgaacaacatatggggcacagggctatgtattggtacaagcagaaagctaagaagccaccggagctcatgtttgtctacagctatgagaaactctctataaatgaaagtgtgccaagtcgcttctcacctgaatgccccaacagctctctcttaaaccttcacctacacgccctgcagccagaagactcagccctgtatctctgcgccagcagtgagcatctgagtgtctacgtcgacagatacgcagtattttggcccaggcacccggctgacagtgctcggtaagcgggggctcccgctgaagccccggaactggggagggggcgccccgggacgcgcatctgagtgtctacctgatggcgcgagggaggc

SEQ ID NO: 3218 - DNA, 495 bp, Artificial Sequence
  source: /note="Description of Artificial Sequence: Synthetic polynucleotide"
gccttgccagcccgctcaggcatctgagtacagtgtcctcctacagttcccatagacactgaagttacccagacaccaaaacacctggtcatgggaatgacaaataagaagtctttgaaatgtgaacaacatatggggcacagggctatgtattggtacaagcagaaagctaagaagccaccggagctcatgtttgtctacagctatgagaaactctctataaatgaaagtgtgccaagtcgcttctcacctgaatgccccaacagctctctcttaaaccttcacctacacgccctgcagccagaagactcagccctgtatctctgcgccagcagtgagcatctgagtacagtggtcgacaaaacattcagtacttcggcgccgggacccggctctcagtgctgggtaagctggggccgccgggggaccggggacgagactgcgctcgggtttttgtgcggcatctgagtacagtgctgatggcgcgagggaggc

SEQ ID NO: 3219 - DNA, 495 bp, Artificial Sequence
  source: /note="Description of Artificial Sequence: Synthetic polynucleotide"
gccttgccagcccgctcaggcatctgaggatcatctcctcctacagttcccatagacactgaagttacccagacaccaaaacacctggtcatgggaatgacaaataagaagtctttgaaatgtgaacaacatatggggcacagggctatgtattggtacaagcagaaagctaagaagccaccggagctcatgtttgtctacagctatgagaaactctctataaatgaaagtgtgccaagtcgcttctcacctgaatgccccaacagctctctcttaaaccttcacctacacgccctgcagccagaagactcagccctgtatctctgcgccagcagtgagcatctgaggatcatcgtcgacgagacccagtacttcgggccaggcacgcggctcctggtgctcggtgagcgcgggctgctggggcgcgggcgcgggcggcttgggtctggtttttgcgggggcatctgaggatcatcctgatggcgcgagggaggc

SEQ ID NO: 3220 - DNA, 495 bp, Artificial Sequence
  source: /note="Description of Artificial Sequence: Synthetic polynucleotide"
gccttgccagcccgctcaggcatctgatattggcgtcctcctacagttcccatagacactgaagttacccagacaccaaaacacctggtcatgggaatgacaaataagaagtctttgaaatgtgaacaacatatggggcacagggctatgtattggtacaagcagaaagctaagaagccaccggagctcatgtttgtctacagctatgagaaactctctataaatgaaagtgtgccaagtcgcttctcacctgaatgccccaacagctctctcttaaaccttcacctacacgccctgcagccagaagactcagccctgtatctctgcgccagcagtgagcatctgatattggcggtcgacgggccaacgtcctgactttcggggccggcagcaggctgaccgtgctgggtgagttttcgcgggaccacccgggcggcgggattcaggtggaaggcggcgggcatctgatattggcgctgatggcgcgagggaggc

SEQ ID NO: 3221 - DNA, 495 bp, Artificial Sequence
  source: /note="Description of Artificial Sequence: Synthetic polynucleotide"
gccttgccagcccgctcaggcatctgaaggcttgatcctcctacagttcccatagacactgaagttacccagacaccaaaacacctggtcatgggaatgacaaataagaagtctttgaaatgtgaacaacatatggggcacagggctatgtattggtacaagcagaaagctaagaagccaccggagctcatgtttgtctacagctatgagaaactctctataaatgaaagtgtgccaagtcgcttctcacctgaatgccccaacagctctctcttaaaccttcacctacacgccctgcagccagaagactcagccctgtatctctgcgccagcagtgagcatctgaaggcttgagtcgacacgagcagtacttcgggccgggcaccaggctcacggtcacaggtgagattcgggcgtctccccaccttccagcccctcggtccccggagtcggagggtgggcatctgaaggcttgactgatggcgcgagggaggc

SEQ ID NO: 3222 - DNA, 495 bp, Artificial Sequence
  source: /note="Description of Artificial Sequence: Synthetic polynucleotide"
gccttgccagcccgctcagtgctacacgacactcttccccccgcagtccccatggaaacgggagttacgcagacaccaagacacctggtcatgggaatgacaaataagaagtctttgaaatgtgaacaacatctggggcataacgctatgtattggtacaagcaaagtgctaagaagccactggagctcatgtttgtctacaactttaaagaacagactgaaaacaacagtgtgccaagtcgcttctcacctgaatgccccaacagctctcacttattccttcacctacacaccctgcagccagaagactcggccctgtatctctgtgccagcagtgatgctacacgacactctgtcgacactgaagctttctttggacaaggcaccagactcacagttgtaggtaagacatttttcaggttcttttgcagatccgtcacagggaaaagtgggtccacagtgctacacgacactctctgatggcgcgagggaggc

SEQ ID NO: 3223 - DNA, 495 bp, Artificial Sequence
  source: /note="Description of Artificial Sequence: Synthetic polynucleotide"
gccttgccagcccgctcagtgctacacttcggaactccccccgcagtccccatggaaacgggagttacgcagacaccaagacacctggtcatgggaatgacaaataagaagtctttgaaatgtgaacaacatctggggcataacgctatgtattggtacaagcaaagtgctaagaagccactggagctcatgtttgtctacaactttaaagaacagactgaaaacaacagtgtgccaagtcgcttctcacctgaatgccccaacagctctcacttattccttcacctacacaccctgcagccagaagactcggccctgtatctctgtgccagcagtgatgctacacttcggaacgtcgactatggctacaccttcggttcggggaccaggttaaccgttgtaggtaaggctgggggtctctaggaggggtgcgatgagggaggactctgtcctgggaaattgctacacttcggaacctgatggcgcgagggaggc

SEQ ID NO: 3224 - DNA, 495 bp, Artificial Sequence
  source: /note="Description of Artificial Sequence: Synthetic polynucleotide"
gccttgccagcccgctcagtgctacacaagtaacgtccccccgcagtccccatggaaacgggagttacgcagacaccaagacacctggtcatgggaatgacaaataagaagtctttgaaatgtgaacaacatctggggcataacgctatgtattggtacaagcaaagtgctaagaagccactggagctcatgtttgtctacaactttaaagaacagactgaaaacaacagtgtgccaagtcgcttctcacctgaatgccccaacagctctcacttattccttcacctacacaccctgcagccagaagactcggccctgtatctctgtgccagcagtgatgctacacaagtaacggtcgacgaaacaccatatattttggagagggaagttggctcactgttgtaggtgagtaagtcaaggctggacagctgggaacttgcaaaaaggggctggaatccagtgctacacaagtaacgctgatggcgcgagggaggc

SEQ ID NO: 3225 - DNA, 495 bp, Artificial Sequence
  source: /note="Description of Artificial Sequence: Synthetic polynucleotide"
gccttgccagcccgctcagtgctacacgtctcctatccccccgcagtccccatggaaacgggagttacgcagacaccaagacacctggtcatgggaatgacaaataagaagtctttgaaatgtgaacaacatctggggcataacgctatgtattggtacaagcaaagtgctaagaagccactggagctcatgtttgtctacaactttaaagaacagactgaaaacaacagtgtgccaagtcgcttctcacctgaatgccccaacagctctcacttattccttcacctacacaccctgcagccagaagactcggccctgtatctctgtgccagcagtgatgctacacgtctcctagtcgacaatgaaaaactgttttttggcagtggaacccagctctctgtcttgggtatgtaaaagacttctttcgggatagtgtatcataaggtcggagttccaggagtgctacacgtctcctactgatggcgcgagggaggc

SEQ ID NO: 3226 - DNA, 495 bp, Artificial Sequence
  source: /note="Description of Artificial Sequence: Synthetic polynucleotide"
gccttgccagcccgctcagtgctacacagagtgtctccccccgcagtccccatggaaacgggagttacgcagacaccaagacacctggtcatgggaatgacaaataagaagtctttgaaatgtgaacaacatctggggcataacgctatgtattggtacaagcaaagtgctaagaagccactggagctcatgtttgtctacaactttaaagaacagactgaaaacaacagtgtgccaagtcgcttctcacctgaatgccccaacagctctcacttattccttcacctacacaccctgcagccagaagactcggccctgtatctctgtgccagcagtgatgctacacagagtgtcgtcgacatcagccccagcattttggtgatgggactcgactctccatcctaggtaagttgcagaatcagggtggtatggccattgtcccttgaaggcagagttctcttgctacacagagtgtcctgatggcgcgagggaggc

SEQ ID NO: 3227 - DNA, 495 bp, Artificial Sequence
  source: /note="Description of Artificial Sequence: Synthetic polynucleotide"
gccttgccagcccgctcagtgctacacgttccgaatccccccgcagtccccatggaaacgggagttacgcagacaccaagacacctggtcatgggaatgacaaataagaagtctttgaaatgtgaacaacatctggggcataacgctatgtattggtacaagcaaagtgctaagaagccactggagctcatgtttgtctacaactttaaagaacagactgaaaacaacagtgtgccaagtcgcttctcacctgaatgccccaacagctctcacttattccttcacctacacaccctgcagccagaagactcggccctgtatctctgtgccagcagtgatgctacacgttccgaagtcgacataattcacccctccactttgggaacgggaccaggctcactgtgacaggtatgggggctccactcttgactcgggggtgcctgggtttgactgcaatgattgctacacgttccgaactgatggcgcgagggaggc

SEQ ID NO: 3228 - DNA, 495 bp, Artificial Sequence
  source: /note="Description of Artificial Sequence: Synthetic polynucleotide"
gccttgccagcccgctcagtgctacaccgttactttccccccgcagtccccatggaaacgggagttacgcagacaccaagacacctggtcatgggaatgacaaataagaagtctttgaaatgtgaacaacatctggggcataacgctatgtattggtacaagcaaagtgctaagaagccactggagctcatgtttgtctacaactttaaagaacagactgaaaacaacagtgtgccaagtcgcttctcacctgaatgccccaacagctctcacttattccttcacctacacaccctgcagccagaagactcggccctgtatctctgtgccagcagtgatgctacaccgttacttgtcgacacaatgagcagttcttcgggccagggacacggctcaccgtgctaggtaagaagggggctccaggtgggagagagggtgagcagcccagcctgcacgaccctgctacaccgttacttctgatggcgcgagggaggc

SEQ ID NO: 3229 - DNA, 495 bp, Artificial Sequence
  source: /note="Description of Artificial Sequence: Synthetic polynucleotide"
gccttgccagcccgctcagtgctacactaggagactccccccgcagtccccatggaaacgggagttacgcagacaccaagacacctggtcatgggaatgacaaataagaagtctttgaaatgtgaacaacatctggggcataacgctatgtattggtacaagcaaagtgctaagaagccactggagctcatgtttgtctacaactttaaagaacagactgaaaacaacagtgtgccaagtcgcttctcacctgaatgccccaacagctctcacttattccttcacctacacaccctgcagccagaagactcggccctgtatctctgtgccagcagtgatgctacactaggagacgtcgacaccggggagctgttttttggagaaggctctaggctgaccgtactgggtaaggaggcggttggggctccggagagctccgagagggcgggatgggcagaggtgctacactaggagacctgatggcgcgagggaggc

SEQ ID NO: 3230 - DNA, 495 bp, Artificial Sequence
  source: /note="Description of Artificial Sequence: Synthetic polynucleotide"
gccttgccagcccgctcagtgctacacgtgtctactccccccgcagtccccatggaaacgggagttacgcagacaccaagacacctggtcatgggaatgacaaataagaagtctttgaaatgtgaacaacatctggggcataacgctatgtattggtacaagcaaagtgctaagaagccactggagctcatgtttgtctacaactttaaagaacagactgaaaacaacagtgtgccaagtcgcttctcacctgaatgccccaacagctctcacttattccttcacctacacaccctgcagccagaagactcggccctgtatctctgtgccagcagtgatgctacacgtgtctacgtcgacagatacgcagtattttggcccaggcacccggctgacagtgctcggtaagcgggggctcccgctgaagccccggaactggggagggggcgccccgggacgctgctacacgtgtctacctgatggcgcgagggaggc

SEQ ID NO: 3231 - DNA, 495 bp, Artificial Sequence
  source: /note="Description of Artificial Sequence: Synthetic polynucleotide"
gccttgccagcccgctcagtgctacacgtacagtgtccccccgcagtccccatggaaacgggagttacgcagacaccaagacacctggtcatgggaatgacaaataagaagtctttgaaatgtgaacaacatctggggcataacgctatgtattggtacaagcaaagtgctaagaagccactggagctcatgtttgtctacaactttaaagaacagactgaaaacaacagtgtgccaagtcgcttctcacctgaatgccccaacagctctcacttattccttcacctacacaccctgcagccagaagactcggccctgtatctctgtgccagcagtgatgctacacgtacagtggtcgacaaaacattcagtacttcggcgccgggacccggctctcagtgctgggtaagctggggccgccgggggaccggggacgagactgcgctcgggtttttgtgcgtgctacacgtacagtgctgatggcgcgagggaggc

SEQ ID NO: 3232 - DNA, 495 bp, Artificial Sequence
  source: /note="Description of Artificial Sequence: Synthetic polynucleotide"
gccttgccagcccgctcagtgctacacggatcatctccccccgcagtccccatggaaacgggagttacgcagacaccaagacacctggtcatgggaatgacaaataagaagtctttgaaatgtgaacaacatctggggcataacgctatgtattggtacaagcaaagtgctaagaagccactggagctcatgtttgtctacaactttaaagaacagactgaaaacaacagtgtgccaagtcgcttctcacctgaatgccccaacagctctcacttattccttcacctacacaccctgcagccagaagactcggccctgtatctctgtgccagcagtgatgctacacggatcatcgtcgacgagacccagtacttcgggccaggcacgcggctcctggtgctcggtgagcgcgggctgctggggcgcgggcgcgggcggcttgggtctggtttttgcggggtgctacacggatcatcctgatggcgcgagggaggc

SEQ ID NO: 3233 - DNA, 495 bp, Artificial Sequence
  source: /note="Description of Artificial Sequence: Synthetic polynucleotide"
gccttgccagcccgctcagtgctacactattggcgtccccccgcagtccccatggaaacgggagttacgcagacaccaagacacctggtcatgggaatgacaaataagaagtctttgaaatgtgaacaacatctggggcataacgctatgtattggtacaagcaaagtgctaagaagccactggagctcatgtttgtctacaactttaaagaacagactgaaaacaacagtgtgccaagtcgcttctcacctgaatgccccaacagctctcacttattccttcacctacacaccctgcagccagaagactcggccctgtatctctgtgccagcagtgatgctacactattggcggtcgacgggccaacgtcctgactttcggggccggcagcaggctgaccgtgctgggtgagttttcgcgggaccacccgggcggcgggattcaggtggaaggcggcggtgctacactattggcgctgatggcgcgagggaggc

SEQ ID NO: 3234 - DNA, 495 bp, Artificial Sequence
  source: /note="Description of Artificial Sequence: Synthetic polynucleotide"
gccttgccagcccgctcagtgctacacaggcttgatccccccgcagtccccatggaaacgggagttacgcagacaccaagacacctggtcatgggaatgacaaataagaagtctttgaaatgtgaacaacatctggggcataacgctatgtattggtacaagcaaagtgctaagaagccactggagctcatgtttgtctacaactttaaagaacagactgaaaacaacagtgtgccaagtcgcttctcacctgaatgccccaacagctctcacttattccttcacctacacaccctgcagccagaagactcggccctgtatctctgtgccagcagtgatgctacacaggcttgagtcgacacgagcagtacttcgggccgggcaccaggctcacggtcacaggtgagattcgggcgtctccccaccttccagcccctcggtccccggagtcggagggtggtgctacacaggcttgactgatggcgcgagggaggc

SEQ ID NO: 3235 - DNA, 495 bp, Artificial Sequence
  source: /note="Description of Artificial Sequence: Synthetic polynucleotide"
gccttgccagcccgctcagaactgccagacactcttccccccacagtccccatggaaacgggagttacgcagacaccaagacacctggtcatgggaatgacaaataagaagtctttgaaatgtgaacaacatctgggtcataacgctatgtattggtacaagcaaagtgctaagaagccactggagctcatgtttgtctacagtcttgaagaacgggttgaaaacaacagtgtgccaagtcgcttctcacctgaatgccccaacagctctcacttattccttcacctacacaccctgcagccagaagactcggccctgtatctctgcgccagcagtgaaactgccagacactctgtcgacactgaagctttctttggacaaggcaccagactcacagttgtaggtaagacatttttcaggttcttttgcagatccgtcacagggaaaagtgggtccacagaactgccagacactctctgatggcgcgagggaggc

SEQ ID NO: 3236 - DNA, 495 bp, Artificial Sequence
  source: /note="Description of Artificial Sequence: Synthetic polynucleotide"
gccttgccagcccgctcagaactgccattcggaactccccccacagtccccatggaaacgggagttacgcagacaccaagacacctggtcatgggaatgacaaataagaagtctttgaaatgtgaacaacatctgggtcataacgctatgtattggtacaagcaaagtgctaagaagccactggagctcatgtttgtctacagtcttgaagaacgggttgaaaacaacagtgtgccaagtcgcttctcacctgaatgccccaacagctctcacttattccttcacctacacaccctgcagccagaagactcggccctgtatctctgcgccagcagtgaaactgccattcggaacgtcgactatggctacaccttcggttcggggaccaggttaaccgttgtaggtaaggctgggggtctctaggaggggtgcgatgagggaggactctgtcctgggaaataactgccattcggaacctgatggcgcgagggaggc

SEQ ID NO: 3237 - DNA, 495 bp, Artificial Sequence
  source: /note="Description of Artificial Sequence: Synthetic polynucleotide"
gccttgccagcccgctcagaactgccaaagtaacgtccccccacagtccccatggaaacgggagttacgcagacaccaagacacctggtcatgggaatgacaaataagaagtctttgaaatgtgaacaacatctgggtcataacgctatgtattggtacaagcaaagtgctaagaagccactggagctcatgtttgtctacagtcttgaagaacgggttgaaaacaacagtgtgccaagtcgcttctcacctgaatgccccaacagctctcacttattccttcacctacacaccctgcagccagaagactcggccctgtatctctgcgccagcagtgaaactgccaaagtaacggtcgacgaaacaccatatattttggagagggaagttggctcactgttgtaggtgagtaagtcaaggctggacagctgggaacttgcaaaaaggggctggaatccagaactgccaaagtaacgctgatggcgcgagggaggc

SEQ ID NO: 3238 - DNA, 495 bp, Artificial Sequence
  source: /note="Description of Artificial Sequence: Synthetic polynucleotide"
gccttgccagcccgctcagaactgccagtctcctatccccccacagtccccatggaaacgggagttacgcagacaccaagacacctggtcatgggaatgacaaataagaagtctttgaaatgtgaacaacatctgggtcataacgctatgtattggtacaagcaaagtgctaagaagccactggagctcatgtttgtctacagtcttgaagaacgggttgaaaacaacagtgtgccaagtcgcttctcacctgaatgccccaacagctctcacttattccttcacctacacaccctgcagccagaagactcggccctgtatctctgcgccagcagtgaaactgccagtctcctagtcgacaatgaaaaactgttttttggcagtggaacccagctctctgtcttgggtatgtaaaagacttctttcgggatagtgtatcataaggtcggagttccaggagaactgccagtctcctactgatggcgcgagggaggc

SEQ ID NO: 3239 - DNA, 495 bp, Artificial Sequence
  source: /note="Description of Artificial Sequence: Synthetic polynucleotide"
gccttgccagcccgctcagaactgccaagagtgtctccccccacagtccccatggaaacgggagttacgcagacaccaagacacctggtcatgggaatgacaaataagaagtctttgaaatgtgaacaacatctgggtcataacgctatgtattggtacaagcaaagtgctaagaagccactggagctcatgtttgtctacagtcttgaagaacgggttgaaaacaacagtgtgccaagtcgcttctcacctgaatgccccaacagctctcacttattccttcacctacacaccctgcagccagaagactcggccctgtatctctgcgccagcagtgaaactgccaagagtgtcgtcgacatcagccccagcattttggtgatgggactcgactctccatcctaggtaagttgcagaatcagggtggtatggccattgtcccttgaaggcagagttctctaactgccaagagtgtcctgatggcgcgagggaggc

SEQ ID NO: 3240 - DNA, 495 bp, Artificial Sequence
  source: /note="Description of Artificial Sequence: Synthetic polynucleotide"
gccttgccagcccgctcagaactgccagttccgaatccccccacagtccccatggaaacgggagttacgcagacaccaagacacctggtcatgggaatgacaaataagaagtctttgaaatgtgaacaacatctgggtcataacgctatgtattggtacaagcaaagtgctaagaagccactggagctcatgtttgtctacagtcttgaagaacgggttgaaaacaacagtgtgccaagtcgcttctcacctgaatgccccaacagctctcacttattccttcacctacacaccctgcagccagaagactcggccctgtatctctgcgccagcagtgaaactgccagttccgaagtcgacataattcacccctccactttgggaacgggaccaggctcactgtgacaggtatgggggctccactcttgactcgggggtgcctgggtttgactgcaatgataactgccagttccgaactgatggcgcgagggaggc

SEQ ID NO: 3241 - DNA, 495 bp, Artificial Sequence
  source: /note="Description of Artificial Sequence: Synthetic polynucleotide"
gccttgccagcccgctcagaactgccacgttactttccccccacagtccccatggaaacgggagttacgcagacaccaagacacctggtcatgggaatgacaaataagaagtctttgaaatgtgaacaacatctgggtcataacgctatgtattggtacaagcaaagtgctaagaagccactggagctcatgtttgtctacagtcttgaagaacgggttgaaaacaacagtgtgccaagtcgcttctcacctgaatgccccaacagctctcacttattccttcacctacacaccctgcagccagaagactcggccctgtatctctgcgccagcagtgaaactgccacgttacttgtcgacacaatgagcagttcttcgggccagggacacggctcaccgtgctaggtaagaagggggctccaggtgggagagagggtgagcagcccagcctgcacgacccaactgccacgttacttctgatggcgcgagggaggc

SEQ ID NO: 3242 - DNA, 495 bp, Artificial Sequence
  source: /note="Description of Artificial Sequence: Synthetic polynucleotide"
gccttgccagcccgctcagaactgccataggagactccccccacagtccccatggaaacgggagttacgcagacaccaagacacctggtcatgggaatgacaaataagaagtctttgaaatgtgaacaacatctgggtcataacgctatgtattggtacaagcaaagtgctaagaagccactggagctcatgtttgtctacagtcttgaagaacgggttgaaaacaacagtgtgccaagtcgcttctcacctgaatgccccaacagctctcacttattccttcacctacacaccctgcagccagaagactcggccctgtatctctgcgccagcagtgaaactgccataggagacgtcgacaccggggagctgttttttggagaaggctctaggctgaccgtactgggtaaggaggcggttggggctccggagagctccgagagggcgggatgggcagaggaactgccataggagacctgatggcgcgagggaggc

SEQ ID NO: 3243 - DNA, 495 bp, Artificial Sequence
  source: /note="Description of Artificial Sequence: Synthetic polynucleotide"
gccttgccagcccgctcagaactgccagtgtctactccccccacagtccccatggaaacgggagttacgcagacaccaagacacctggtcatgggaatgacaaataagaagtctttgaaatgtgaacaacatctgggtcataacgctatgtattggtacaagcaaagtgctaagaagccactggagctcatgtttgtctacagtcttgaagaacgggttgaaaacaacagtgtgccaagtcgcttctcacctgaatgccccaacagctctcacttattccttcacctacacaccctgcagccagaagactcggccctgtatctctgcgccagcagtgaaactgccagtgtctacgtcgacagatacgcagtattttggcccaggcacccggctgacagtgctcggtaagcgggggctcccgctgaagccccggaactggggagggggcgccccgggacgcaactgccagtgtctacctgatggcgcgagggaggc

SEQ ID NO: 3244 - DNA, 495 bp, Artificial Sequence
  source: /note="Description of Artificial Sequence: Synthetic polynucleotide"
gccttgccagcccgctcagaactgccagtacagtgtccccccacagtccccatggaaacgggagttacgcagacaccaagacacctggtcatgggaatgacaaataagaagtctttgaaatgtgaacaacatctgggtcataacgctatgtattggtacaagcaaagtgctaagaagccactggagctcatgtttgtctacagtcttgaagaacgggttgaaaacaacagtgtgccaagtcgcttctcacctgaatgccccaacagctctcacttattccttcacctacacaccctgcagccagaagactcggccctgtatctctgcgccagcagtgaaactgccagtacagtggtcgacaaaacattcagtacttcggcgccgggacccggctctcagtgctgggtaagctggggccgccgggggaccggggacgagactgcgctcgggtttttgtgcgaactgccagtacagtgctgatggcgcgagggaggc

SEQ ID NO: 3245 - DNA, 495 bp, Artificial Sequence
  source: /note="Description of Artificial Sequence: Synthetic polynucleotide"
gccttgccagcccgctcagaactgccaggatcatctccccccacagtccccatggaaacgggagttacgcagacaccaagacacctggtcatgggaatgacaaataagaagtctttgaaatgtgaacaacatctgggtcataacgctatgtattggtacaagcaaagtgctaagaagccactggagctcatgtttgtctacagtcttgaagaacgggttgaaaacaacagtgtgccaagtcgcttctcacctgaatgccccaacagctctcacttattccttcacctacacaccctgcagccagaagactcggccctgtatctctgcgccagcagtgaaactgccaggatcatcgtcgacgagacccagtacttcgggccaggcacgcggctcctggtgctcggtgagcgcgggctgctggggcgcgggcgcgggcggcttgggtctggtttttgcggggaactgccaggatcatcctgatggcgcgagggaggc

SEQ ID NO: 3246 - DNA, 495 bp, Artificial Sequence
  source: /note="Description of Artificial Sequence: Synthetic polynucleotide"
gccttgccagcccgctcagaactgccatattggcgtccccccacagtccccatggaaacgggagttacgcagacaccaagacacctggtcatgggaatgacaaataagaagtctttgaaatgtgaacaacatctgggtcataacgctatgtattggtacaagcaaagtgctaagaagccactggagctcatgtttgtctacagtcttgaagaacgggttgaaaacaacagtgtgccaagtcgcttctcacctgaatgccccaacagctctcacttattccttcacctacacaccctgcagccagaagactcggccctgtatctctgcgccagcagtgaaactgccatattggcggtcgacgggccaacgtcctgactttcggggccggcagcaggctgaccgtgctgggtgagttttcgcgggaccacccgggcggcgggattcaggtggaaggcggcggaactgccatattggcgctgatggcgcgagggaggc

SEQ ID NO: 3247 - DNA, 495 bp, Artificial Sequence
  source: /note="Description of Artificial Sequence: Synthetic polynucleotide"
gccttgccagcccgctcagaactgccaaggcttgatccccccacagtccccatggaaacgggagttacgcagacaccaagacacctggtcatgggaatgacaaataagaagtctttgaaatgtgaacaacatctgggtcataacgctatgtattggtacaagcaaagtgctaagaagccactggagctcatgtttgtctacagtcttgaagaacgggttgaaaacaacagtgtgccaagtcgcttctcacctgaatgccccaacagctctcacttattccttcacctacacaccctgcagccagaagactcggccctgtatctctgcgccagcagtgaaactgccaaggcttgagtcgacacgagcagtacttcgggccgggcaccaggctcacggtcacaggtgagattcgggcgtctccccaccttccagcccctcggtccccggagtcggagggtggaactgccaaggcttgactgatggcgcgagggaggc

SEQ ID NO: 3248 - DNA, 495 bp, Artificial Sequence
  source: /note="Description of Artificial Sequence: Synthetic polynucleotide"
gccttgccagcccgctcagttggactggacactctcttttcccacaggcccagtaaaggctggagtcactcaaactccaagatatctgatcaaaacgagaggacagcaagtgacactgagctgctcccctatctctgggcataggagtgtatcctggtaccaacagaccccaggacagggccttcagttcctctttgaatacttcagtgagacacagagaaacaaaggaaacttccctggtcgattctcagggcgccagttctctaactctcgctctgagatgaatgtgagcaccttggagctgggggactcggccctttatctttgcgccagcatgattggactggacactctgtcgacactgaagctttctttggacaaggcaccagactcacagttgtaggtaagacatttttcaggttcttttgcagatccgtcacagggaaaagtgggtccacagttggactggacactctctgatggcgcgagggaggc

SEQ ID NO: 3249 - DNA, 495 bp, Artificial Sequence
  source: /note="Description of Artificial Sequence: Synthetic polynucleotide"
gccttgccagcccgctcagttggactgttcggaaccttttcccacaggcccagtaaaggctggagtcactcaaactccaagatatctgatcaaaacgagaggacagcaagtgacactgagctgctcccctatctctgggcataggagtgtatcctggtaccaacagaccccaggacagggccttcagttcctctttgaatacttcagtgagacacagagaaacaaaggaaacttccctggtcgattctcagggcgccagttctctaactctcgctctgagatgaatgtgagcaccttggagctgggggactcggccctttatctttgcgccagcatgattggactgttcggaacgtcgactatggctacaccttcggttcggggaccaggttaaccgttgtaggtaaggctgggggtctctaggaggggtgcgatgagggaggactctgtcctgggaaatttggactgttcggaacctgatggcgcgagggaggc

SEQ ID NO: 3250 - DNA, 495 bp, Artificial Sequence
  source: /note="Description of Artificial Sequence: Synthetic polynucleotide"
gccttgccagcccgctcagttggactgaagtaacgcttttcccacaggcccagtaaaggctggagtcactcaaactccaagatatctgatcaaaacgagaggacagcaagtgacactgagctgctcccctatctctgggcataggagtgtatcctggtaccaacagaccccaggacagggccttcagttcctctttgaatacttcagtgagacacagagaaacaaaggaaacttccctggtcgattctcagggcgccagttctctaactctcgctctgagatgaatgtgagcaccttggagctgggggactcggccctttatctttgcgccagcatgattggactgaagtaacggtcgacgaaacaccatatattttggagagggaagttggctcactgttgtaggtgagtaagtcaaggctggacagctgggaacttgcaaaaaggggctggaatccagttggactgaagtaacgctgatggcgcgagggaggc

SEQ ID NO: 3251 - DNA, 495 bp, Artificial Sequence
  source: /note="Description of Artificial Sequence: Synthetic polynucleotide"
gccttgccagcccgctcagttggactggtctcctacttttcccacaggcccagtaaaggctggagtcactcaaactccaagatatctgatcaaaacgagaggacagcaagtgacactgagctgctcccctatctctgggcataggagtgtatcctggtaccaacagaccccaggacagggccttcagttcctctttgaatacttcagtgagacacagagaaacaaaggaaacttccctggtcgattctcagggcgccagttctctaactctcgctctgagatgaatgtgagcaccttggagctgggggactcggccctttatctttgcgccagcatgattggactggtctcctagtcgacaatgaaaaactgttttttggcagtggaacccagctctctgtcttgggtatgtaaaagacttctttcgggatagtgtatcataaggtcggagttccaggagttggactggtctcctactgatggcgcgagggaggc

SEQ ID NO: 3252 - DNA, 495 bp, Artificial Sequence
  source: /note="Description of Artificial Sequence: Synthetic polynucleotide"
gccttgccagcccgctcagttggactgagagtgtccttttcccacaggcccagtaaaggctggagtcactcaaactccaagatatctgatcaaaacgagaggacagcaagtgacactgagctgctcccctatctctgggcataggagtgtatcctggtaccaacagaccccaggacagggccttcagttcctctttgaatacttcagtgagacacagagaaacaaaggaaacttccctggtcgattctcagggcgccagttctctaactctcgctctgagatgaatgtgagcaccttggagctgggggactcggccctttatctttgcgccagcatgattggactgagagtgtcgtcgacatcagccccagcattttggtgatgggactcgactctccatcctaggtaagttgcagaatcagggtggtatggccattgtcccttgaaggcagagttctctttggactgagagtgtcctgatggcgcgagggaggc

SEQ ID NO: 3253 - DNA, 495 bp, Artificial Sequence
  source: /note="Description of Artificial Sequence: Synthetic polynucleotide"
gccttgccagcccgctcagttggactggttccgaacttttcccacaggcccagtaaaggctggagtcactcaaactccaagatatctgatcaaaacgagaggacagcaagtgacactgagctgctcccctatctctgggcataggagtgtatcctggtaccaacagaccccaggacagggccttcagttcctctttgaatacttcagtgagacacagagaaacaaaggaaacttccctggtcgattctcagggcgccagttctctaactctcgctctgagatgaatgtgagcaccttggagctgggggactcggccctttatctttgcgccagcatgattggactggttccgaagtcgacataattcacccctccactttgggaacgggaccaggctcactgtgacaggtatgggggctccactcttgactcgggggtgcctgggtttgactgcaatgatttggactggttccgaactgatggcgcgagggaggc

SEQ ID NO: 3254 - DNA, 495 bp, Artificial Sequence
  source: /note="Description of Artificial Sequence: Synthetic polynucleotide"
gccttgccagcccgctcagttggactgcgttacttcttttcccacaggcccagtaaaggctggagtcactcaaactccaagatatctgatcaaaacgagaggacagcaagtgacactgagctgctcccctatctctgggcataggagtgtatcctggtaccaacagaccccaggacagggccttcagttcctctttgaatacttcagtgagacacagagaaacaaaggaaacttccctggtcgattctcagggcgccagttctctaactctcgctctgagatgaatgtgagcaccttggagctgggggactcggccctttatctttgcgccagcatgattggactgcgttacttgtcgacacaatgagcagttcttcgggccagggacacggctcaccgtgctaggtaagaagggggctccaggtgggagagagggtgagcagcccagcctgcacgacccttggactgcgttacttctgatggcgcgagggaggc

SEQ ID NO: 3255 - DNA, 495 bp, Artificial Sequence
  source: /note="Description of Artificial Sequence: Synthetic polynucleotide"
gccttgccagcccgctcagttggactgtaggagaccttttcccacaggcccagtaaaggctggagtcactcaaactccaagatatctgatcaaaacgagaggacagcaagtgacactgagctgctcccctatctctgggcataggagtgtatcctggtaccaacagaccccaggacagggccttcagttcctctttgaatacttcagtgagacacagagaaacaaaggaaacttccctggtcgattctcagggcgccagttctctaactctcgctctgagatgaatgtgagcaccttggagctgggggactcggccctttatctttgcgccagcatgattggactgtaggagacgtcgacaccggggagctgttttttggagaaggctctaggctgaccgtactgggtaaggaggcggttggggctccggagagctccgagagggcgggatgggcagaggttggactgtaggagacctgatggcgcgagggaggc

SEQ ID NO: 3256 - DNA, 495 bp, Artificial Sequence
  source: /note="Description of Artificial Sequence: Synthetic polynucleotide"
gccttgccagcccgctcagttggactggtgtctaccttttcccacaggcccagtaaaggctggagtcactcaaactccaagatatctgatcaaaacgagaggacagcaagtgacactgagctgctcccctatctctgggcataggagtgtatcctggtaccaacagaccccaggacagggccttcagttcctctttgaatacttcagtgagacacagagaaacaaaggaaacttccctggtcgattctcagggcgccagttctctaactctcgctctgagatgaatgtgagcaccttggagctgggggactcggccctttatctttgcgccagcatgattggactggtgtctacgtcgacagatacgcagtattttggcccaggcacccggctgacagtgctcggtaagcgggggctcccgctgaagccccggaactggggagggggcgccccgggacgcttggactggtgtctacctgatggcgcgagggaggc

SEQ ID NO: 3257 - DNA, 495 bp, Artificial Sequence
  source: /note="Description of Artificial Sequence: Synthetic polynucleotide"
gccttgccagcccgctcagttggactggtacagtgcttttcccacaggcccagtaaaggctggagtcactcaaactccaagatatctgatcaaaacgagaggacagcaagtgacactgagctgctcccctatctctgggcataggagtgtatcctggtaccaacagaccccaggacagggccttcagttcctctttgaatacttcagtgagacacagagaaacaaaggaaacttccctggtcgattctcagggcgccagttctctaactctcgctctgagatgaatgtgagcaccttggagctgggggactcggccctttatctttgcgccagcatgattggactggtacagtggtcgacaaaacattcagtacttcggcgccgggacccggctctcagtgctgggtaagctggggccgccgggggaccggggacgagactgcgctcgggtttttgtgcgttggactggtacagtgctgatggcgcgagggaggc

SEQ ID NO: 3258 - DNA, 495 bp, Artificial Sequence
  source: /note="Description of Artificial Sequence: Synthetic polynucleotide"
gccttgccagcccgctcagttggactgggatcatccttttcccacaggcccagtaaaggctggagtcactcaaactccaagatatctgatcaaaacgagaggacagcaagtgacactgagctgctcccctatctctgggcataggagtgtatcctggtaccaacagaccccaggacagggccttcagttcctctttgaatacttcagtgagacacagagaaacaaaggaaacttccctggtcgattctcagggcgccagttctctaactctcgctctgagatgaatgtgagcaccttggagctgggggactcggccctttatctttgcgccagcatgattggactgggatcatcgtcgacgagacccagtacttcgggccaggcacgcggctcctggtgctcggtgagcgcgggctgctggggcgcgggcgcgggcggcttgggtctggtttttgcggggttggactgggatcatcctgatggcgcgagggaggc

SEQ ID NO: 3259 - DNA, 495 bp, Artificial Sequence
  source: /note="Description of Artificial Sequence: Synthetic polynucleotide"
gccttgccagcccgctcagttggactgtattggcgcttttcccacaggcccagtaaaggctggagtcactcaaactccaagatatctgatcaaaacgagaggacagcaagtgacactgagctgctcccctatctctgggcataggagtgtatcctggtaccaacagaccccaggacagggccttcagttcctctttgaatacttcagtgagacacagagaaacaaaggaaacttccctggtcgattctcagggcgccagttctctaactctcgctctgagatgaatgtgagcaccttggagctgggggactcggccctttatctttgcgccagcatgattggactgtattggcggtcgacgggccaacgtcctgactttcggggccggcagcaggctgaccgtgctgggtgagttttcgcgggaccacccgggcggcgggattcaggtggaaggcggcggttggactgtattggcgctgatggcgcgagggaggc

SEQ ID NO: 3260 - DNA, 495 bp, Artificial Sequence
  source: /note="Description of Artificial Sequence: Synthetic polynucleotide"
gccttgccagcccgctcagttggactgaggcttgacttttcccacaggcccagtaaaggctggagtcactcaaactccaagatatctgatcaaaacgagaggacagcaagtgacactgagctgctcccctatctctgggcataggagtgtatcctggtaccaacagaccccaggacagggccttcagttcctctttgaatacttcagtgagacacagagaaacaaaggaaacttccctggtcgattctcagggcgccagttctctaactctcgctctgagatgaatgtgagcaccttggagctgggggactcggccctttatctttgcgccagcatgattggactgaggcttgagtcgacacgagcagtacttcgggccgggcaccaggctcacggtcacaggtgagattcgggcgtctccccaccttccagcccctcggtccccggagtcggagggtggttggactgaggcttgactgatggcgcgagggaggc

SEQ ID NO: 3261 - DNA, 495 bp, Artificial Sequence
  source: /note="Description of Artificial Sequence: Synthetic polynucleotide"
gccttgccagcccgctcaggtagacacgacactctttctccacctattttttcctcaggcccagtggaggctggaatcacccaagctccaagacacctgatcaaaacaagagaccagcaagtgacactgagatgctcccctgcctctgggcataactgtgtgtcctggtacctacgaactccaagtcagcccctctagttattgttacaatattgtaataggttacaaagagcaaaaggaaacttgcctaattgattctcagctcaccacgtccataactattactgagtcaaacacggagctaggggactcagccctgtatctctgtgccagcatgagtagacacgacactctgtcgacactgaagctttctttggacaaggcaccagactcacagttgtaggtaagacatttttcaggttcttttgcagatccgtcacagggaaaagtgggtccacaggtagacacgacactctctgatggcgcgagggaggc

SEQ ID NO: 3262 - DNA, 495 bp, Artificial Sequence
  source: /note="Description of Artificial Sequence: Synthetic polynucleotide"
gccttgccagcccgctcaggtagacacttcggaacttctccacctattttttcctcaggcccagtggaggctggaatcacccaagctccaagacacctgatcaaaacaagagaccagcaagtgacactgagatgctcccctgcctctgggcataactgtgtgtcctggtacctacgaactccaagtcagcccctctagttattgttacaatattgtaataggttacaaagagcaaaaggaaacttgcctaattgattctcagctcaccacgtccataactattactgagtcaaacacggagctaggggactcagccctgtatctctgtgccagcatgagtagacacttcggaacgtcgactatggctacaccttcggttcggggaccaggttaaccgttgtaggtaaggctgggggtctctaggaggggtgcgatgagggaggactctgtcctgggaaatgtagacacttcggaacctgatggcgcgagggaggc

SEQ ID NO: 3263 - DNA, 495 bp, Artificial Sequence
  source: /note="Description of Artificial Sequence: Synthetic polynucleotide"
gccttgccagcccgctcaggtagacacaagtaacgttctccacctattttttcctcaggcccagtggaggctggaatcacccaagctccaagacacctgatcaaaacaagagaccagcaagtgacactgagatgctcccctgcctctgggcataactgtgtgtcctggtacctacgaactccaagtcagcccctctagttattgttacaatattgtaataggttacaaagagcaaaaggaaacttgcctaattgattctcagctcaccacgtccataactattactgagtcaaacacggagctaggggactcagccctgtatctctgtgccagcatgagtagacacaagtaacggtcgacgaaacaccatatattttggagagggaagttggctcactgttgtaggtgagtaagtcaaggctggacagctgggaacttgcaaaaaggggctggaatccaggtagacacaagtaacgctgatggcgcgagggaggc

SEQ ID NO: 3264 - DNA, 495 bp, Artificial Sequence
  source: /note="Description of Artificial Sequence: Synthetic polynucleotide"
gccttgccagcccgctcaggtagacacgtctcctattctccacctattttttcctcaggcccagtggaggctggaatcacccaagctccaagacacctgatcaaaacaagagaccagcaagtgacactgagatgctcccctgcctctgggcataactgtgtgtcctggtacctacgaactccaagtcagcccctctagttattgttacaatattgtaataggttacaaagagcaaaaggaaacttgcctaattgattctcagctcaccacgtccataactattactgagtcaaacacggagctaggggactcagccctgtatctctgtgccagcatgagtagacacgtctcctagtcgacaatgaaaaactgttttttggcagtggaacccagctctctgtcttgggtatgtaaaagacttctttcgggatagtgtatcataaggtcggagttccaggaggtagacacgtctcctactgatggcgcgagggaggc

SEQ ID NO: 3265 - DNA, 495 bp, Artificial Sequence
  source: /note="Description of Artificial Sequence: Synthetic polynucleotide"
gccttgccagcccgctcaggtagacacagagtgtcttctccacctattttttcctcaggcccagtggaggctggaatcacccaagctccaagacacctgatcaaaacaagagaccagcaagtgacactgagatgctcccctgcctctgggcataactgtgtgtcctggtacctacgaactccaagtcagcccctctagttattgttacaatattgtaataggttacaaagagcaaaaggaaacttgcctaattgattctcagctcaccacgtccataactattactgagtcaaacacggagctaggggactcagccctgtatctctgtgccagcatgagtagacacagagtgtcgtcgacatcagccccagcattttggtgatgggactcgactctccatcctaggtaagttgcagaatcagggtggtatggccattgtcccttgaaggcagagttctctgtagacacagagtgtcctgatggcgcgagggaggc

SEQ ID NO: 3266 - DNA, 495 bp, Artificial Sequence
  source: /note="Description of Artificial Sequence: Synthetic polynucleotide"
gccttgccagcccgctcaggtagacacgttccgaattctccacctattttttcctcaggcccagtggaggctggaatcacccaagctccaagacacctgatcaaaacaagagaccagcaagtgacactgagatgctcccctgcctctgggcataactgtgtgtcctggtacctacgaactccaagtcagcccctctagttattgttacaatattgtaataggttacaaagagcaaaaggaaacttgcctaattgattctcagctcaccacgtccataactattactgagtcaaacacggagctaggggactcagccctgtatctctgtgccagcatgagtagacacgttccgaagtcgacataattcacccctccactttgggaacgggaccaggctcactgtgacaggtatgggggctccactcttgactcgggggtgcctgggtttgactgcaatgatgtagacacgttccgaactgatggcgcgagggaggc

SEQ ID NO: 3267 - DNA, 495 bp, Artificial Sequence
  source: /note="Description of Artificial Sequence: Synthetic polynucleotide"
gccttgccagcccgctcaggtagacaccgttacttttctccacctattttttcctcaggcccagtggaggctggaatcacccaagctccaagacacctgatcaaaacaagagaccagcaagtgacactgagatgctcccctgcctctgggcataactgtgtgtcctggtacctacgaactccaagtcagcccctctagttattgttacaatattgtaataggttacaaagagcaaaaggaaacttgcctaattgattctcagctcaccacgtccataactattactgagtcaaacacggagctaggggactcagccctgtatctctgtgccagcatgagtagacaccgttacttgtcgacacaatgagcagttcttcgggccagggacacggctcaccgtgctaggtaagaagggggctccaggtgggagagagggtgagcagcccagcctgcacgacccgtagacaccgttacttctgatggcgcgagggaggc

SEQ ID NO: 3268 - DNA, 495 bp, Artificial Sequence
  source: /note="Description of Artificial Sequence: Synthetic polynucleotide"
gccttgccagcccgctcaggtagacactaggagacttctccacctattttttcctcaggcccagtggaggctggaatcacccaagctccaagacacctgatcaaaacaagagaccagcaagtgacactgagatgctcccctgcctctgggcataactgtgtgtcctggtacctacgaactccaagtcagcccctctagttattgttacaatattgtaataggttacaaagagcaaaaggaaacttgcctaattgattctcagctcaccacgtccataactattactgagtcaaacacggagctaggggactcagccctgtatctctgtgccagcatgagtagacactaggagacgtcgacaccggggagctgttttttggagaaggctctaggctgaccgtactgggtaaggaggcggttggggctccggagagctccgagagggcgggatgggcagagggtagacactaggagacctgatggcgcgagggaggc

SEQ ID NO: 3269 - DNA, 495 bp, Artificial Sequence
  source: /note="Description of Artificial Sequence: Synthetic polynucleotide"
gccttgccagcccgctcaggtagacacgtgtctacttctccacctattttttcctcaggcccagtggaggctggaatcacccaagctccaagacacctgatcaaaacaagagaccagcaagtgacactgagatgctcccctgcctctgggcataactgtgtgtcctggtacctacgaactccaagtcagcccctctagttattgttacaatattgtaataggttacaaagagcaaaaggaaacttgcctaattgattctcagctcaccacgtccataactattactgagtcaaacacggagctaggggactcagccctgtatctctgtgccagcatgagtagacacgtgtctacgtcgacagatacgcagtattttggcccaggcacccggctgacagtgctcggtaagcgggggctcccgctgaagccccggaactggggagggggcgccccgggacgcgtagacacgtgtctacctgatggcgcgagggaggc

SEQ ID NO: 3270 - DNA, 495 bp, Artificial Sequence
  source: /note="Description of Artificial Sequence: Synthetic polynucleotide"
gccttgccagcccgctcaggtagacacgtacagtgttctccacctattttttcctcaggcccagtggaggctggaatcacccaagctccaagacacctgatcaaaacaagagaccagcaagtgacactgagatgctcccctgcctctgggcataactgtgtgtcctggtacctacgaactccaagtcagcccctctagttattgttacaatattgtaataggttacaaagagcaaaaggaaacttgcctaattgattctcagctcaccacgtccataactattactgagtcaaacacggagctaggggactcagccctgtatctctgtgccagcatgagtagacacgtacagtggtcgacaaaacattcagtacttcggcgccgggacccggctctcagtgctgggtaagctggggccgccgggggaccggggacgagactgcgctcgggtttttgtgcggtagacacgtacagtgctgatggcgcgagggaggc

SEQ ID NO: 3271 - DNA, 495 bp, Artificial Sequence
  source: /note="Description of Artificial Sequence: Synthetic polynucleotide"
gccttgccagcccgctcaggtagacacggatcatcttctccacctattttttcctcaggcccagtggaggctggaatcacccaagctccaagacacctgatcaaaacaagagaccagcaagtgacactgagatgctcccctgcctctgggcataactgtgtgtcctggtacctacgaactccaagtcagcccctctagttattgttacaatattgtaataggttacaaagagcaaaaggaaacttgcctaattgattctcagctcaccacgtccataactattactgagtcaaacacggagctaggggactcagccctgtatctctgtgccagcatgagtagacacggatcatcgtcgacgagacccagtacttcgggccaggcacgcggctcctggtgctcggtgagcgcgggctgctggggcgcgggcgcgggcggcttgggtctggtttttgcgggggtagacacggatcatcctgatggcgcgagggaggc

SEQ ID NO: 3272 - DNA, 495 bp, Artificial Sequence
  source: /note="Description of Artificial Sequence: Synthetic polynucleotide"
gccttgccagcccgctcaggtagacactattggcgttctccacctattttttcctcaggcccagtggaggctggaatcacccaagctccaagacacctgatcaaaacaagagaccagcaagtgacactgagatgctcccctgcctctgggcataactgtgtgtcctggtacctacgaactccaagtcagcccctctagttattgttacaatattgtaataggttacaaagagcaaaaggaaacttgcctaattgattctcagctcaccacgtccataactattactgagtcaaacacggagctaggggactcagccctgtatctctgtgccagcatgagtagacactattggcggtcgacgggccaacgtcctgactttcggggccggcagcaggctgaccgtgctgggtgagttttcgcgggaccacccgggcggcgggattcaggtggaaggcggcgggtagacactattggcgctgatggcgcgagggaggc

SEQ ID NO: 3273 - DNA, 495 bp, Artificial Sequence
  source: /note="Description of Artificial Sequence: Synthetic polynucleotide"
gccttgccagcccgctcaggtagacacaggcttgattctccacctattttttcctcaggcccagtggaggctggaatcacccaagctccaagacacctgatcaaaacaagagaccagcaagtgacactgagatgctcccctgcctctgggcataactgtgtgtcctggtacctacgaactccaagtcagcccctctagttattgttacaatattgtaataggttacaaagagcaaaaggaaacttgcctaattgattctcagctcaccacgtccataactattactgagtcaaacacggagctaggggactcagccctgtatctctgtgccagcatgagtagacacaggcttgagtcgacacgagcagtacttcgggccgggcaccaggctcacggtcacaggtgagattcgggcgtctccccaccttccagcccctcggtccccggagtcggagggtgggtagacacaggcttgactgatggcgcgagggaggc

SEQ ID NO: 3274 - DNA, 495 bp, Artificial Sequence
  source: /note="Description of Artificial Sequence: Synthetic polynucleotide"
gccttgccagcccgctcagcactgtacgacactctcttttcccacaggcccagtggaggctggagtcacccaaagtcccacacacctgatcaaaacgagaggacagcaagtgactctgagatgctctcctatctctgggcacagcagtgtgtcctggtaccaacaggccccgggtcaggggccccagtttatctttgaatatgctaatgagttaaggagatcagaaggaaacttccctaatcgattctcagggcgccagttccatgactgttgctctgagatgaatgtgagtgccttggagctgggggactcggccctgtatctctgtgccagaatgacactgtacgacactctgtcgacactgaagctttctttggacaaggcaccagactcacagttgtaggtaagacatttttcaggttcttttgcagatccgtcacagggaaaagtgggtccacagcactgtacgacactctctgatggcgcgagggaggc

SEQ ID NO: 3275 - DNA, 495 bp, Artificial Sequence
  source: /note="Description of Artificial Sequence: Synthetic polynucleotide"
gccttgccagcccgctcagcactgtacttcggaaccttttcccacaggcccagtggaggctggagtcacccaaagtcccacacacctgatcaaaacgagaggacagcaagtgactctgagatgctctcctatctctgggcacagcagtgtgtcctggtaccaacaggccccgggtcaggggccccagtttatctttgaatatgctaatgagttaaggagatcagaaggaaacttccctaatcgattctcagggcgccagttccatgactgttgctctgagatgaatgtgagtgccttggagctgggggactcggccctgtatctctgtgccagaatgacactgtacttcggaacgtcgactatggctacaccttcggttcggggaccaggttaaccgttgtaggtaaggctgggggtctctaggaggggtgcgatgagggaggactctgtcctgggaaatcactgtacttcggaacctgatggcgcgagggaggc

SEQ ID NO: 3276 - DNA, 495 bp, Artificial Sequence
  source: /note="Description of Artificial Sequence: Synthetic polynucleotide"
gccttgccagcccgctcagcactgtacaagtaacgcttttcccacaggcccagtggaggctggagtcacccaaagtcccacacacctgatcaaaacgagaggacagcaagtgactctgagatgctctcctatctctgggcacagcagtgtgtcctggtaccaacaggccccgggtcaggggccccagtttatctttgaatatgctaatgagttaaggagatcagaaggaaacttccctaatcgattctcagggcgccagttccatgactgttgctctgagatgaatgtgagtgccttggagctgggggactcggccctgtatctctgtgccagaatgacactgtacaagtaacggtcgacgaaacaccatatattttggagagggaagttggctcactgttgtaggtgagtaagtcaaggctggacagctgggaacttgcaaaaaggggctggaatccagcactgtacaagtaacgctgatggcgcgagggaggc

SEQ ID NO: 3277 - DNA, 495 bp, Artificial Sequence
  source: /note="Description of Artificial Sequence: Synthetic polynucleotide"
gccttgccagcccgctcagcactgtacgtctcctacttttcccacaggcccagtggaggctggagtcacccaaagtcccacacacctgatcaaaacgagaggacagcaagtgactctgagatgctctcctatctctgggcacagcagtgtgtcctggtaccaacaggccccgggtcaggggccccagtttatctttgaatatgctaatgagttaaggagatcagaaggaaacttccctaatcgattctcagggcgccagttccatgactgttgctctgagatgaatgtgagtgccttggagctgggggactcggccctgtatctctgtgccagaatgacactgtacgtctcctagtcgacaatgaaaaactgttttttggcagtggaacccagctctctgtcttgggtatgtaaaagacttctttcgggatagtgtatcataaggtcggagttccaggagcactgtacgtctcctactgatggcgcgagggaggc

SEQ ID NO: 3278 - DNA, 495 bp, Artificial Sequence
  source: /note="Description of Artificial Sequence: Synthetic polynucleotide"
gccttgccagcccgctcagcactgtacagagtgtccttttcccacaggcccagtggaggctggagtcacccaaagtcccacacacctgatcaaaacgagaggacagcaagtgactctgagatgctctcctatctctgggcacagcagtgtgtcctggtaccaacaggccccgggtcaggggccccagtttatctttgaatatgctaatgagttaaggagatcagaaggaaacttccctaatcgattctcagggcgccagttccatgactgttgctctgagatgaatgtgagtgccttggagctgggggactcggccctgtatctctgtgccagaatgacactgtacagagtgtcgtcgacatcagccccagcattttggtgatgggactcgactctccatcctaggtaagttgcagaatcagggtggtatggccattgtcccttgaaggcagagttctctcactgtacagagtgtcctgatggcgcgagggaggc

SEQ ID NO: 3279 - DNA, 495 bp, Artificial Sequence
  source: /note="Description of Artificial Sequence: Synthetic polynucleotide"
gccttgccagcccgctcagcactgtacgttccgaacttttcccacaggcccagtggaggctggagtcacccaaagtcccacacacctgatcaaaacgagaggacagcaagtgactctgagatgctctcctatctctgggcacagcagtgtgtcctggtaccaacaggccccgggtcaggggccccagtttatctttgaatatgctaatgagttaaggagatcagaaggaaacttccctaatcgattctcagggcgccagttccatgactgttgctctgagatgaatgtgagtgccttggagctgggggactcggccctgtatctctgtgccagaatgacactgtacgttccgaagtcgacataattcacccctccactttgggaacgggaccaggctcactgtgacaggtatgggggctccactcttgactcgggggtgcctgggtttgactgcaatgatcactgtacgttccgaactgatggcgcgagggaggc

SEQ ID NO: 3280 - DNA, 495 bp, Artificial Sequence
  source: /note="Description of Artificial Sequence: Synthetic polynucleotide"
gccttgccagcccgctcagcactgtaccgttacttcttttcccacaggcccagtggaggctggagtcacccaaagtcccacacacctgatcaaaacgagaggacagcaagtgactctgagatgctctcctatctctgggcacagcagtgtgtcctggtaccaacaggccccgggtcaggggccccagtttatctttgaatatgctaatgagttaaggagatcagaaggaaacttccctaatcgattctcagggcgccagttccatgactgttgctctgagatgaatgtgagtgccttggagctgggggactcggccctgtatctctgtgccagaatgacactgtaccgttacttgtcgacacaatgagcagttcttcgggccagggacacggctcaccgtgctaggtaagaagggggctccaggtgggagagagggtgagcagcccagcctgcacgaccccactgtaccgttacttctgatggcgcgagggaggc

SEQ ID NO: 3281 - DNA, 495 bp, Artificial Sequence
  source: /note="Description of Artificial Sequence: Synthetic polynucleotide"
gccttgccagcccgctcagcactgtactaggagaccttttcccacaggcccagtggaggctggagtcacccaaagtcccacacacctgatcaaaacgagaggacagcaagtgactctgagatgctctcctatctctgggcacagcagtgtgtcctggtaccaacaggccccgggtcaggggccccagtttatctttgaatatgctaatgagttaaggagatcagaaggaaacttccctaatcgattctcagggcgccagttccatgactgttgctctgagatgaatgtgagtgccttggagctgggggactcggccctgtatctctgtgccagaatgacactgtactaggagacgtcgacaccggggagctgttttttggagaaggctctaggctgaccgtactgggtaaggaggcggttggggctccggagagctccgagagggcgggatgggcagaggcactgtactaggagacctgatggcgcgagggaggc

SEQ ID NO: 3282 - DNA, 495 bp, Artificial Sequence
  source: /note="Description of Artificial Sequence: Synthetic polynucleotide"
gccttgccagcccgctcagcactgtacgtgtctaccttttcccacaggcccagtggaggctggagtcacccaaagtcccacacacctgatcaaaacgagaggacagcaagtgactctgagatgctctcctatctctgggcacagcagtgtgtcctggtaccaacaggccccgggtcaggggccccagtttatctttgaatatgctaatgagttaaggagatcagaaggaaacttccctaatcgattctcagggcgccagttccatgactgttgctctgagatgaatgtgagtgccttggagctgggggactcggccctgtatctctgtgccagaatgacactgtacgtgtctacgtcgacagatacgcagtattttggcccaggcacccggctgacagtgctcggtaagcgggggctcccgctgaagccccggaactggggagggggcgccccgggacgccactgtacgtgtctacctgatggcgcgagggaggc

SEQ ID NO: 3283 - DNA, 495 bp, Artificial Sequence
  source: /note="Description of Artificial Sequence: Synthetic polynucleotide"
gccttgccagcccgctcagcactgtacgtacagtgcttttcccacaggcccagtggaggctggagtcacccaaagtcccacacacctgatcaaaacgagaggacagcaagtgactctgagatgctctcctatctctgggcacagcagtgtgtcctggtaccaacaggccccgggtcaggggccccagtttatctttgaatatgctaatgagttaaggagatcagaaggaaacttccctaatcgattctcagggcgccagttccatgactgttgctctgagatgaatgtgagtgccttggagctgggggactcggccctgtatctctgtgccagaatgacactgtacgtacagtggtcgacaaaacattcagtacttcggcgccgggacccggctctcagtgctgggtaagctggggccgccgggggaccggggacgagactgcgctcgggtttttgtgcgcactgtacgtacagtgctgatggcgcgagggaggc

SEQ ID NO: 3284 - DNA, 495 bp, Artificial Sequence
  source: /note="Description of Artificial Sequence: Synthetic polynucleotide"
gccttgccagcccgctcagcactgtacggatcatccttttcccacaggcccagtggaggctggagtcacccaaagtcccacacacctgatcaaaacgagaggacagcaagtgactctgagatgctctcctatctctgggcacagcagtgtgtcctggtaccaacaggccccgggtcaggggccccagtttatctttgaatatgctaatgagttaaggagatcagaaggaaacttccctaatcgattctcagggcgccagttccatgactgttgctctgagatgaatgtgagtgccttggagctgggggactcggccctgtatctctgtgccagaatgacactgtacggatcatcgtcgacgagacccagtacttcgggccaggcacgcggctcctggtgctcggtgagcgcgggctgctggggcgcgggcgcgggcggcttgggtctggtttttgcggggcactgtacggatcatcctgatggcgcgagggaggc

SEQ ID NO: 3285 - DNA, 495 bp, Artificial Sequence
  source: /note="Description of Artificial Sequence: Synthetic polynucleotide"
gccttgccagcccgctcagcactgtactattggcgcttttcccacaggcccagtggaggctggagtcacccaaagtcccacacacctgatcaaaacgagaggacagcaagtgactctgagatgctctcctatctctgggcacagcagtgtgtcctggtaccaacaggccccgggtcaggggccccagtttatctttgaatatgctaatgagttaaggagatcagaaggaaacttccctaatcgattctcagggcgccagttccatgactgttgctctgagatgaatgtgagtgccttggagctgggggactcggccctgtatctctgtgccagaatgacactgtactattggcggtcgacgggccaacgtcctgactttcggggccggcagcaggctgaccgtgctgggtgagttttcgcgggaccacccgggcggcgggattcaggtggaaggcggcggcactgtactattggcgctgatggcgcgagggaggc

SEQ ID NO: 3286 - DNA, 495 bp, Artificial Sequence
  source: /note="Description of Artificial Sequence: Synthetic polynucleotide"
gccttgccagcccgctcagcactgtacaggcttgacttttcccacaggcccagtggaggctggagtcacccaaagtcccacacacctgatcaaaacgagaggacagcaagtgactctgagatgctctcctatctctgggcacagcagtgtgtcctggtaccaacaggccccgggtcaggggccccagtttatctttgaatatgctaatgagttaaggagatcagaaggaaacttccctaatcgattctcagggcgccagttccatgactgttgctctgagatgaatgtgagtgccttggagctgggggactcggccctgtatctctgtgccagaatgacactgtacaggcttgagtcgacacgagcagtacttcgggccgggcaccaggctcacggtcacaggtgagattcgggcgtctccccaccttccagcccctcggtccccggagtcggagggtggcactgtacaggcttgactgatggcgcgagggaggc

SEQ ID NO: 3287 - DNA, 495 bp, Artificial Sequence
  source: /note="Description of Artificial Sequence: Synthetic polynucleotide"
gccttgccagcccgctcaggatgatccgacactctcttttcccacaggctcagtggagactggagtcacccaaagtcccacacacctgatcaaaacgagaggacagcaagtgactctgagatgctcttctcagtctgggcacaacactgtgtcctggtaccaacaggccctgggtcaggggccccagtttatctttcagtattatagggaggaagagaatggcagaggaaacttccctcctagattctcaggtctccagttccctaattatagctctgagctgaatgtgaacgccttggagctggacgactcggccctgtatctctgtgccagcatgagatgatccgacactctgtcgacactgaagctttctttggacaaggcaccagactcacagttgtaggtaagacatttttcaggttcttttgcagatccgtcacagggaaaagtgggtccacaggatgatccgacactctctgatggcgcgagggaggc

SEQ ID NO: 3288 - DNA, 495 bp, Artificial Sequence
  source: /note="Description of Artificial Sequence: Synthetic polynucleotide"
gccttgccagcccgctcaggatgatccttcggaaccttttcccacaggctcagtggagactggagtcacccaaagtcccacacacctgatcaaaacgagaggacagcaagtgactctgagatgctcttctcagtctgggcacaacactgtgtcctggtaccaacaggccctgggtcaggggccccagtttatctttcagtattatagggaggaagagaatggcagaggaaacttccctcctagattctcaggtctccagttccctaattatagctctgagctgaatgtgaacgccttggagctggacgactcggccctgtatctctgtgccagcatgagatgatccttcggaacgtcgactatggctacaccttcggttcggggaccaggttaaccgttgtaggtaaggctgggggtctctaggaggggtgcgatgagggaggactctgtcctgggaaatgatgatccttcggaacctgatggcgcgagggaggc

SEQ ID NO: 3289 - DNA, 495 bp, Artificial Sequence
  source: /note="Description of Artificial Sequence: Synthetic polynucleotide"
gccttgccagcccgctcaggatgatccaagtaacgcttttcccacaggctcagtggagactggagtcacccaaagtcccacacacctgatcaaaacgagaggacagcaagtgactctgagatgctcttctcagtctgggcacaacactgtgtcctggtaccaacaggccctgggtcaggggccccagtttatctttcagtattatagggaggaagagaatggcagaggaaacttccctcctagattctcaggtctccagttccctaattatagctctgagctgaatgtgaacgccttggagctggacgactcggccctgtatctctgtgccagcatgagatgatccaagtaacggtcgacgaaacaccatatattttggagagggaagttggctcactgttgtaggtgagtaagtcaaggctggacagctgggaacttgcaaaaaggggctggaatccaggatgatccaagtaacgctgatggcgcgagggaggc

SEQ ID NO: 3290 - DNA, 495 bp, Artificial Sequence
  source: /note="Description of Artificial Sequence: Synthetic polynucleotide"
gccttgccagcccgctcaggatgatccgtctcctacttttcccacaggctcagtggagactggagtcacccaaagtcccacacacctgatcaaaacgagaggacagcaagtgactctgagatgctcttctcagtctgggcacaacactgtgtcctggtaccaacaggccctgggtcaggggccccagtttatctttcagtattatagggaggaagagaatggcagaggaaacttccctcctagattctcaggtctccagttccctaattatagctctgagctgaatgtgaacgccttggagctggacgactcggccctgtatctctgtgccagcatgagatgatccgtctcctagtcgacaatgaaaaactgttttttggcagtggaacccagctctctgtcttgggtatgtaaaagacttctttcgggatagtgtatcataaggtcggagttccaggaggatgatccgtctcctactgatggcgcgagggaggc

SEQ ID NO: 3291 - DNA, 495 bp, Artificial Sequence
  source: /note="Description of Artificial Sequence: Synthetic polynucleotide"
gccttgccagcccgctcaggatgatccagagtgtccttttcccacaggctcagtggagactggagtcacccaaagtcccacacacctgatcaaaacgagaggacagcaagtgactctgagatgctcttctcagtctgggcacaacactgtgtcctggtaccaacaggccctgggtcaggggccccagtttatctttcagtattatagggaggaagagaatggcagaggaaacttccctcctagattctcaggtctccagttccctaattatagctctgagctgaatgtgaacgccttggagctggacgactcggccctgtatctctgtgccagcatgagatgatccagagtgtcgtcgacatcagccccagcattttggtgatgggactcgactctccatcctaggtaagttgcagaatcagggtggtatggccattgtcccttgaaggcagagttctctgatgatccagagtgtcctgatggcgcgagggaggc

SEQ ID NO: 3292 - DNA, 495 bp, Artificial Sequence
  source: /note="Description of Artificial Sequence: Synthetic polynucleotide"
gccttgccagcccgctcaggatgatccgttccgaacttttcccacaggctcagtggagactggagtcacccaaagtcccacacacctgatcaaaacgagaggacagcaagtgactctgagatgctcttctcagtctgggcacaacactgtgtcctggtaccaacaggccctgggtcaggggccccagtttatctttcagtattatagggaggaagagaatggcagaggaaacttccctcctagattctcaggtctccagttccctaattatagctctgagctgaatgtgaacgccttggagctggacgactcggccctgtatctctgtgccagcatgagatgatccgttccgaagtcgacataattcacccctccactttgggaacgggaccaggctcactgtgacaggtatgggggctccactcttgactcgggggtgcctgggtttgactgcaatgatgatgatccgttccgaactgatggcgcgagggaggc

SEQ ID NO: 3293 - DNA, 495 bp, Artificial Sequence
  source: /note="Description of Artificial Sequence: Synthetic polynucleotide"
gccttgccagcccgctcaggatgatcccgttacttcttttcccacaggctcagtggagactggagtcacccaaagtcccacacacctgatcaaaacgagaggacagcaagtgactctgagatgctcttctcagtctgggcacaacactgtgtcctggtaccaacaggccctgggtcaggggccccagtttatctttcagtattatagggaggaagagaatggcagaggaaacttccctcctagattctcaggtctccagttccctaattatagctctgagctgaatgtgaacgccttggagctggacgactcggccctgtatctctgtgccagcatgagatgatcccgttacttgtcgacacaatgagcagttcttcgggccagggacacggctcaccgtgctaggtaagaagggggctccaggtgggagagagggtgagcagcccagcctgcacgacccgatgatcccgttacttctgatggcgcgagggaggc

SEQ ID NO: 3294 - DNA, 495 bp, Artificial Sequence
  source: /note="Description of Artificial Sequence: Synthetic polynucleotide"
gccttgccagcccgctcaggatgatcctaggagaccttttcccacaggctcagtggagactggagtcacccaaagtcccacacacctgatcaaaacgagaggacagcaagtgactctgagatgctcttctcagtctgggcacaacactgtgtcctggtaccaacaggccctgggtcaggggccccagtttatctttcagtattatagggaggaagagaatggcagaggaaacttccctcctagattctcaggtctccagttccctaattatagctctgagctgaatgtgaacgccttggagctggacgactcggccctgtatctctgtgccagcatgagatgatcctaggagacgtcgacaccggggagctgttttttggagaaggctctaggctgaccgtactgggtaaggaggcggttggggctccggagagctccgagagggcgggatgggcagagggatgatcctaggagacctgatggcgcgagggaggc

SEQ ID NO: 3295 - DNA, 495 bp, Artificial Sequence
  source: /note="Description of Artificial Sequence: Synthetic polynucleotide"
gccttgccagcccgctcaggatgatccgtgtctaccttttcccacaggctcagtggagactggagtcacccaaagtcccacacacctgatcaaaacgagaggacagcaagtgactctgagatgctcttctcagtctgggcacaacactgtgtcctggtaccaacaggccctgggtcaggggccccagtttatctttcagtattatagggaggaagagaatggcagaggaaacttccctcctagattctcaggtctccagttccctaattatagctctgagctgaatgtgaacgccttggagctggacgactcggccctgtatctctgtgccagcatgagatgatccgtgtctacgtcgacagatacgcagtattttggcccaggcacccggctgacagtgctcggtaagcgggggctcccgctgaagccccggaactggggagggggcgccccgggacgcgatgatccgtgtctacctgatggcgcgagggaggc

SEQ ID NO: 3296 - DNA, 495 bp, Artificial Sequence
  source: /note="Description of Artificial Sequence: Synthetic polynucleotide"
gccttgccagcccgctcaggatgatccgtacagtgcttttcccacaggctcagtggagactggagtcacccaaagtcccacacacctgatcaaaacgagaggacagcaagtgactctgagatgctcttctcagtctgggcacaacactgtgtcctggtaccaacaggccctgggtcaggggccccagtttatctttcagtattatagggaggaagagaatggcagaggaaacttccctcctagattctcaggtctccagttccctaattatagctctgagctgaatgtgaacgccttggagctggacgactcggccctgtatctctgtgccagcatgagatgatccgtacagtggtcgacaaaacattcagtacttcggcgccgggacccggctctcagtgctgggtaagctggggccgccgggggaccggggacgagactgcgctcgggtttttgtgcggatgatccgtacagtgctgatggcgcgagggaggc

SEQ ID NO: 3297 - DNA, 495 bp, Artificial Sequence
  source: /note="Description of Artificial Sequence: Synthetic polynucleotide"
gccttgccagcccgctcaggatgatccggatcatccttttcccacaggctcagtggagactggagtcacccaaagtcccacacacctgatcaaaacgagaggacagcaagtgactctgagatgctcttctcagtctgggcacaacactgtgtcctggtaccaacaggccctgggtcaggggccccagtttatctttcagtattatagggaggaagagaatggcagaggaaacttccctcctagattctcaggtctccagttccctaattatagctctgagctgaatgtgaacgccttggagctggacgactcggccctgtatctctgtgccagcatgagatgatccggatcatcgtcgacgagacccagtacttcgggccaggcacgcggctcctggtgctcggtgagcgcgggctgctggggcgcgggcgcgggcggcttgggtctggtttttgcgggggatgatccggatcatcctgatggcgcgagggaggc

SEQ ID NO: 3298 - DNA, 495 bp, Artificial Sequence
  source: /note="Description of Artificial Sequence: Synthetic polynucleotide"
gccttgccagcccgctcaggatgatcctattggcgcttttcccacaggctcagtggagactggagtcacccaaagtcccacacacctgatcaaaacgagaggacagcaagtgactctgagatgctcttctcagtctgggcacaacactgtgtcctggtaccaacaggccctgggtcaggggccccagtttatctttcagtattatagggaggaagagaatggcagaggaaacttccctcctagattctcaggtctccagttccctaattatagctctgagctgaatgtgaacgccttggagctggacgactcggccctgtatctctgtgccagcatgagatgatcctattggcggtcgacgggccaacgtcctgactttcggggccggcagcaggctgaccgtgctgggtgagttttcgcgggaccacccgggcggcgggattcaggtggaaggcggcgggatgatcctattggcgctgatggcgcgagggaggc

SEQ ID NO: 3299 - DNA, 495 bp, Artificial Sequence
  source: /note="Description of Artificial Sequence: Synthetic polynucleotide"
gccttgccagcccgctcaggatgatccaggcttgacttttcccacaggctcagtggagactggagtcacccaaagtcccacacacctgatcaaaacgagaggacagcaagtgactctgagatgctcttctcagtctgggcacaacactgtgtcctggtaccaacaggccctgggtcaggggccccagtttatctttcagtattatagggaggaagagaatggcagaggaaacttccctcctagattctcaggtctccagttccctaattatagctctgagctgaatgtgaacgccttggagctggacgactcggccctgtatctctgtgccagcatgagatgatccaggcttgagtcgacacgagcagtacttcgggccgggcaccaggctcacggtcacaggtgagattcgggcgtctccccaccttccagcccctcggtccccggagtcggagggtgggatgatccaggcttgactgatggcgcgagggaggc

SEQ ID NO: 3300 - DNA, 495 bp, Artificial Sequence
  source: /note="Description of Artificial Sequence: Synthetic polynucleotide"
gccttgccagcccgctcagcgccaatagacactctcttttcccacaggcccagtggacgctggagtcacccaaagtcccacacacctgatcaaaacgagaggacagcaagtgactctgagatgctctcctatctctgggcacaagagtgtgtcctggtaccaacaggtcctgggtcaggggccccagtttatctttcagtattatgagaaagaagagagaggaagaggaaacttccctgatcgattctcagctcgccagttccctaactatagctctgagctgaatgtgaacgccttgttgctgggggactcggccctgtatctctgtgccagcatgacgccaatagacactctgtcgacactgaagctttctttggacaaggcaccagactcacagttgtaggtaagacatttttcaggttcttttgcagatccgtcacagggaaaagtgggtccacagcgccaatagacactctctgatggcgcgagggaggc

SEQ ID NO: 3301 - DNA, 495 bp, Artificial Sequence
  source: /note="Description of Artificial Sequence: Synthetic polynucleotide"
gccttgccagcccgctcagcgccaatattcggaaccttttcccacaggcccagtggacgctggagtcacccaaagtcccacacacctgatcaaaacgagaggacagcaagtgactctgagatgctctcctatctctgggcacaagagtgtgtcctggtaccaacaggtcctgggtcaggggccccagtttatctttcagtattatgagaaagaagagagaggaagaggaaacttccctgatcgattctcagctcgccagttccctaactatagctctgagctgaatgtgaacgccttgttgctgggggactcggccctgtatctctgtgccagcatgacgccaatattcggaacgtcgactatggctacaccttcggttcggggaccaggttaaccgttgtaggtaaggctgggggtctctaggaggggtgcgatgagggaggactctgtcctgggaaatcgccaatattcggaacctgatggcgcgagggaggc

SEQ ID NO: 3302 - DNA, 495 bp, Artificial Sequence
  source: /note="Description of Artificial Sequence: Synthetic polynucleotide"
gccttgccagcccgctcagcgccaataaagtaacgcttttcccacaggcccagtggacgctggagtcacccaaagtcccacacacctgatcaaaacgagaggacagcaagtgactctgagatgctctcctatctctgggcacaagagtgtgtcctggtaccaacaggtcctgggtcaggggccccagtttatctttcagtattatgagaaagaagagagaggaagaggaaacttccctgatcgattctcagctcgccagttccctaactatagctctgagctgaatgtgaacgccttgttgctgggggactcggccctgtatctctgtgccagcatgacgccaataaagtaacggtcgacgaaacaccatatattttggagagggaagttggctcactgttgtaggtgagtaagtcaaggctggacagctgggaacttgcaaaaaggggctggaatccagcgccaataaagtaacgctgatggcgcgagggaggc

SEQ ID NO: 3303 - DNA, 495 bp, Artificial Sequence
  source: /note="Description of Artificial Sequence: Synthetic polynucleotide"
gccttgccagcccgctcagcgccaatagtctcctacttttcccacaggcccagtggacgctggagtcacccaaagtcccacacacctgatcaaaacgagaggacagcaagtgactctgagatgctctcctatctctgggcacaagagtgtgtcctggtaccaacaggtcctgggtcaggggccccagtttatctttcagtattatgagaaagaagagagaggaagaggaaacttccctgatcgattctcagctcgccagttccctaactatagctctgagctgaatgtgaacgccttgttgctgggggactcggccctgtatctctgtgccagcatgacgccaatagtctcctagtcgacaatgaaaaactgttttttggcagtggaacccagctctctgtcttgggtatgtaaaagacttctttcgggatagtgtatcataaggtcggagttccaggagcgccaatagtctcctactgatggcgcgagggaggc

SEQ ID NO: 3304 - DNA, 495 bp, Artificial Sequence
  source: /note="Description of Artificial Sequence: Synthetic polynucleotide"
gccttgccagcccgctcagcgccaataagagtgtccttttcccacaggcccagtggacgctggagtcacccaaagtcccacacacctgatcaaaacgagaggacagcaagtgactctgagatgctctcctatctctgggcacaagagtgtgtcctggtaccaacaggtcctgggtcaggggccccagtttatctttcagtattatgagaaagaagagagaggaagaggaaacttccctgatcgattctcagctcgccagttccctaactatagctctgagctgaatgtgaacgccttgttgctgggggactcggccctgtatctctgtgccagcatgacgccaataagagtgtcgtcgacatcagccccagcattttggtgatgggactcgactctccatcctaggtaagttgcagaatcagggtggtatggccattgtcccttgaaggcagagttctctcgccaataagagtgtcctgatggcgcgagggaggc

SEQ ID NO: 3305 - DNA, 495 bp, Artificial Sequence
  source: /note="Description of Artificial Sequence: Synthetic polynucleotide"
gccttgccagcccgctcagcgccaatagttccgaacttttcccacaggcccagtggacgctggagtcacccaaagtcccacacacctgatcaaaacgagaggacagcaagtgactctgagatgctctcctatctctgggcacaagagtgtgtcctggtaccaacaggtcctgggtcaggggccccagtttatctttcagtattatgagaaagaagagagaggaagaggaaacttccctgatcgattctcagctcgccagttccctaactatagctctgagctgaatgtgaacgccttgttgctgggggactcggccctgtatctctgtgccagcatgacgccaatagttccgaagtcgacataattcacccctccactttgggaacgggaccaggctcactgtgacaggtatgggggctccactcttgactcgggggtgcctgggtttgactgcaatgatcgccaatagttccgaactgatggcgcgagggaggc

SEQ ID NO: 3306 - DNA, 495 bp, Artificial Sequence
  source: /note="Description of Artificial Sequence: Synthetic polynucleotide"
gccttgccagcccgctcagcgccaatacgttacttcttttcccacaggcccagtggacgctggagtcacccaaagtcccacacacctgatcaaaacgagaggacagcaagtgactctgagatgctctcctatctctgggcacaagagtgtgtcctggtaccaacaggtcctgggtcaggggccccagtttatctttcagtattatgagaaagaagagagaggaagaggaaacttccctgatcgattctcagctcgccagttccctaactatagctctgagctgaatgtgaacgccttgttgctgggggactcggccctgtatctctgtgccagcatgacgccaatacgttacttgtcgacacaatgagcagttcttcgggccagggacacggctcaccgtgctaggtaagaagggggctccaggtgggagagagggtgagcagcccagcctgcacgaccccgccaatacgttacttctgatggcgcgagggaggc

SEQ ID NO: 3307 - DNA, 495 bp, Artificial Sequence
  source: /note="Description of Artificial Sequence: Synthetic polynucleotide"
gccttgccagcccgctcagcgccaatataggagaccttttcccacaggcccagtggacgctggagtcacccaaagtcccacacacctgatcaaaacgagaggacagcaagtgactctgagatgctctcctatctctgggcacaagagtgtgtcctggtaccaacaggtcctgggtcaggggccccagtttatctttcagtattatgagaaagaagagagaggaagaggaaacttccctgatcgattctcagctcgccagttccctaactatagctctgagctgaatgtgaacgccttgttgctgggggactcggccctgtatctctgtgccagcatgacgccaatataggagacgtcgacaccggggagctgttttttggagaaggctctaggctgaccgtactgggtaaggaggcggttggggctccggagagctccgagagggcgggatgggcagaggcgccaatataggagacctgatggcgcgagggaggc

SEQ ID NO: 3308 - DNA, 495 bp, Artificial Sequence
  source: /note="Description of Artificial Sequence: Synthetic polynucleotide"
gccttgccagcccgctcagcgccaatagtgtctaccttttcccacaggcccagtggacgctggagtcacccaaagtcccacacacctgatcaaaacgagaggacagcaagtgactctgagatgctctcctatctctgggcacaagagtgtgtcctggtaccaacaggtcctgggtcaggggccccagtttatctttcagtattatgagaaagaagagagaggaagaggaaacttccctgatcgattctcagctcgccagttccctaactatagctctgagctgaatgtgaacgccttgttgctgggggactcggccctgtatctctgtgccagcatgacgccaatagtgtctacgtcgacagatacgcagtattttggcccaggcacccggctgacagtgctcggtaagcgggggctcccgctgaagccccggaactggggagggggcgccccgggacgccgccaatagtgtctacctgatggcgcgagggaggc

SEQ ID NO: 3309 - DNA, 495 bp, Artificial Sequence
  source: /note="Description of Artificial Sequence: Synthetic polynucleotide"
gccttgccagcccgctcagcgccaatagtacagtgcttttcccacaggcccagtggacgctggagtcacccaaagtcccacacacctgatcaaaacgagaggacagcaagtgactctgagatgctctcctatctctgggcacaagagtgtgtcctggtaccaacaggtcctgggtcaggggccccagtttatctttcagtattatgagaaagaagagagaggaagaggaaacttccctgatcgattctcagctcgccagttccctaactatagctctgagctgaatgtgaacgccttgttgctgggggactcggccctgtatctctgtgccagcatgacgccaatagtacagtggtcgacaaaacattcagtacttcggcgccgggacccggctctcagtgctgggtaagctggggccgccgggggaccggggacgagactgcgctcgggtttttgtgcgcgccaatagtacagtgctgatggcgcgagggaggc

SEQ ID NO: 3310 - DNA, 495 bp, Artificial Sequence
  source: /note="Description of Artificial Sequence: Synthetic polynucleotide"
gccttgccagcccgctcagcgccaataggatcatccttttcccacaggcccagtggacgctggagtcacccaaagtcccacacacctgatcaaaacgagaggacagcaagtgactctgagatgctctcctatctctgggcacaagagtgtgtcctggtaccaacaggtcctgggtcaggggccccagtttatctttcagtattatgagaaagaagagagaggaagaggaaacttccctgatcgattctcagctcgccagttccctaactatagctctgagctgaatgtgaacgccttgttgctgggggactcggccctgtatctctgtgccagcatgacgccaataggatcatcgtcgacgagacccagtacttcgggccaggcacgcggctcctggtgctcggtgagcgcgggctgctggggcgcgggcgcgggcggcttgggtctggtttttgcggggcgccaataggatcatcctgatggcgcgagggaggc

SEQ ID NO: 3311 - DNA, 495 bp, Artificial Sequence
  source: /note="Description of Artificial Sequence: Synthetic polynucleotide"
gccttgccagcccgctcagcgccaatatattggcgcttttcccacaggcccagtggacgctggagtcacccaaagtcccacacacctgatcaaaacgagaggacagcaagtgactctgagatgctctcctatctctgggcacaagagtgtgtcctggtaccaacaggtcctgggtcaggggccccagtttatctttcagtattatgagaaagaagagagaggaagaggaaacttccctgatcgattctcagctcgccagttccctaactatagctctgagctgaatgtgaacgccttgttgctgggggactcggccctgtatctctgtgccagcatgacgccaatatattggcggtcgacgggccaacgtcctgactttcggggccggcagcaggctgaccgtgctgggtgagttttcgcgggaccacccgggcggcgggattcaggtggaaggcggcggcgccaatatattggcgctgatggcgcgagggaggc

SEQ ID NO: 3312 - DNA, 495 bp, Artificial Sequence
  source: /note="Description of Artificial Sequence: Synthetic polynucleotide"
gccttgccagcccgctcagcgccaataaggcttgacttttcccacaggcccagtggacgctggagtcacccaaagtcccacacacctgatcaaaacgagaggacagcaagtgactctgagatgctctcctatctctgggcacaagagtgtgtcctggtaccaacaggtcctgggtcaggggccccagtttatctttcagtattatgagaaagaagagagaggaagaggaaacttccctgatcgattctcagctcgccagttccctaactatagctctgagctgaatgtgaacgccttgttgctgggggactcggccctgtatctctgtgccagcatgacgccaataaggcttgagtcgacacgagcagtacttcgggccgggcaccaggctcacggtcacaggtgagattcgggcgtctccccaccttccagcccctcggtccccggagtcggagggtggcgccaataaggcttgactgatggcgcgagggaggc

SEQ ID NO: 3313 - DNA, 495 bp, Artificial Sequence
  source: /note="Description of Artificial Sequence: Synthetic polynucleotide"
gccttgccagcccgctcagtcaagcctgacactctcttttcccacaggcttagtggacgctggagtcacccaaagtcccacacacctgatcaaaacgagaggacagcaagtgactctgagatgctctcctaagtctgggcatgacactgtgtcctggtaccaacaggccctgggtcaggggccccagtttatctttcagtattatgaggaggaagagagacagagaggcaacttccctgatcgattctcaggtcaccagttccctaactatagctctgagctgaatgtgaacgccttgttgctgggggactcggccctctatctctgtgccagcatgatcaagcctgacactctgtcgacactgaagctttctttggacaaggcaccagactcacagttgtaggtaagacatttttcaggttcttttgcagatccgtcacagggaaaagtgggtccacagtcaagcctgacactctctgatggcgcgagggaggc

SEQ ID NO: 3314 - DNA, 495 bp, Artificial Sequence
  source: /note="Description of Artificial Sequence: Synthetic polynucleotide"
gccttgccagcccgctcagtcaagcctttcggaaccttttcccacaggcttagtggacgctggagtcacccaaagtcccacacacctgatcaaaacgagaggacagcaagtgactctgagatgctctcctaagtctgggcatgacactgtgtcctggtaccaacaggccctgggtcaggggccccagtttatctttcagtattatgaggaggaagagagacagagaggcaacttccctgatcgattctcaggtcaccagttccctaactatagctctgagctgaatgtgaacgccttgttgctgggggactcggccctctatctctgtgccagcatgatcaagcctttcggaacgtcgactatggctacaccttcggttcggggaccaggttaaccgttgtaggtaaggctgggggtctctaggaggggtgcgatgagggaggactctgtcctgggaaattcaagcctttcggaacctgatggcgcgagggaggc

SEQ ID NO: 3315 - DNA, 495 bp, Artificial Sequence
  source: /note="Description of Artificial Sequence: Synthetic polynucleotide"
gccttgccagcccgctcagtcaagcctaagtaacgcttttcccacaggcttagtggacgctggagtcacccaaagtcccacacacctgatcaaaacgagaggacagcaagtgactctgagatgctctcctaagtctgggcatgacactgtgtcctggtaccaacaggccctgggtcaggggccccagtttatctttcagtattatgaggaggaagagagacagagaggcaacttccctgatcgattctcaggtcaccagttccctaactatagctctgagctgaatgtgaacgccttgttgctgggggactcggccctctatctctgtgccagcatgatcaagcctaagtaacggtcgacgaaacaccatatattttggagagggaagttggctcactgttgtaggtgagtaagtcaaggctggacagctgggaacttgcaaaaaggggctggaatccagtcaagcctaagtaacgctgatggcgcgagggaggc

SEQ ID NO: 3316 - DNA, 495 bp, Artificial Sequence
  source: /note="Description of Artificial Sequence: Synthetic polynucleotide"
gccttgccagcccgctcagtcaagcctgtctcctacttttcccacaggcttagtggacgctggagtcacccaaagtcccacacacctgatcaaaacgagaggacagcaagtgactctgagatgctctcctaagtctgggcatgacactgtgtcctggtaccaacaggccctgggtcaggggccccagtttatctttcagtattatgaggaggaagagagacagagaggcaacttccctgatcgattctcaggtcaccagttccctaactatagctctgagctgaatgtgaacgccttgttgctgggggactcggccctctatctctgtgccagcatgatcaagcctgtctcctagtcgacaatgaaaaactgttttttggcagtggaacccagctctctgtcttgggtatgtaaaagacttctttcgggatagtgtatcataaggtcggagttccaggagtcaagcctgtctcctactgatggcgcgagggaggc

SEQ ID NO: 3317 - DNA, 495 bp, Artificial Sequence
  source: /note="Description of Artificial Sequence: Synthetic polynucleotide"
gccttgccagcccgctcagtcaagcctagagtgtccttttcccacaggcttagtggacgctggagtcacccaaagtcccacacacctgatcaaaacgagaggacagcaagtgactctgagatgctctcctaagtctgggcatgacactgtgtcctggtaccaacaggccctgggtcaggggccccagtttatctttcagtattatgaggaggaagagagacagagaggcaacttccctgatcgattctcaggtcaccagttccctaactatagctctgagctgaatgtgaacgccttgttgctgggggactcggccctctatctctgtgccagcatgatcaagcctagagtgtcgtcgacatcagccccagcattttggtgatgggactcgactctccatcctaggtaagttgcagaatcagggtggtatggccattgtcccttgaaggcagagttctcttcaagcctagagtgtcctgatggcgcgagggaggc

SEQ ID NO: 3318 - DNA, 495 bp, Artificial Sequence
  source: /note="Description of Artificial Sequence: Synthetic polynucleotide"
gccttgccagcccgctcagtcaagcctgttccgaacttttcccacaggcttagtggacgctggagtcacccaaagtcccacacacctgatcaaaacgagaggacagcaagtgactctgagatgctctcctaagtctgggcatgacactgtgtcctggtaccaacaggccctgggtcaggggccccagtttatctttcagtattatgaggaggaagagagacagagaggcaacttccctgatcgattctcaggtcaccagttccctaactatagctctgagctgaatgtgaacgccttgttgctgggggactcggccctctatctctgtgccagcatgatcaagcctgttccgaagtcgacataattcacccctccactttgggaacgggaccaggctcactgtgacaggtatgggggctccactcttgactcgggggtgcctgggtttgactgcaatgattcaagcctgttccgaactgatggcgcgagggaggc

SEQ ID NO: 3319 - DNA, 495 bp, Artificial Sequence
  source: /note="Description of Artificial Sequence: Synthetic polynucleotide"
gccttgccagcccgctcagtcaagcctcgttacttcttttcccacaggcttagtggacgctggagtcacccaaagtcccacacacctgatcaaaacgagaggacagcaagtgactctgagatgctctcctaagtctgggcatgacactgtgtcctggtaccaacaggccctgggtcaggggccccagtttatctttcagtattatgaggaggaagagagacagagaggcaacttccctgatcgattctcaggtcaccagttccctaactatagctctgagctgaatgtgaacgccttgttgctgggggactcggccctctatctctgtgccagcatgatcaagcctcgttacttgtcgacacaatgagcagttcttcgggccagggacacggctcaccgtgctaggtaagaagggggctccaggtgggagagagggtgagcagcccagcctgcacgaccctcaagcctcgttacttctgatggcgcgagggaggc

SEQ ID NO: 3320 - DNA, 495 bp, Artificial Sequence
  source: /note="Description of Artificial Sequence: Synthetic polynucleotide"
gccttgccagcccgctcagtcaagccttaggagaccttttcccacaggcttagtggacgctggagtcacccaaagtcccacacacctgatcaaaacgagaggacagcaagtgactctgagatgctctcctaagtctgggcatgacactgtgtcctggtaccaacaggccctgggtcaggggccccagtttatctttcagtattatgaggaggaagagagacagagaggcaacttccctgatcgattctcaggtcaccagttccctaactatagctctgagctgaatgtgaacgccttgttgctgggggactcggccctctatctctgtgccagcatgatcaagccttaggagacgtcgacaccggggagctgttttttggagaaggctctaggctgaccgtactgggtaaggaggcggttggggctccggagagctccgagagggcgggatgggcagaggtcaagccttaggagacctgatggcgcgagggaggc

SEQ ID NO: 3321 - DNA, 495 bp, Artificial Sequence
  source: /note="Description of Artificial Sequence: Synthetic polynucleotide"
gccttgccagcccgctcagtcaagcctgtgtctaccttttcccacaggcttagtggacgctggagtcacccaaagtcccacacacctgatcaaaacgagaggacagcaagtgactctgagatgctctcctaagtctgggcatgacactgtgtcctggtaccaacaggccctgggtcaggggccccagtttatctttcagtattatgaggaggaagagagacagagaggcaacttccctgatcgattctcaggtcaccagttccctaactatagctctgagctgaatgtgaacgccttgttgctgggggactcggccctctatctctgtgccagcatgatcaagcctgtgtctacgtcgacagatacgcagtattttggcccaggcacccggctgacagtgctcggtaagcgggggctcccgctgaagccccggaactggggagggggcgccccgggacgctcaagcctgtgtctacctgatggcgcgagggaggc

SEQ ID NO: 3322 - DNA, 495 bp, Artificial Sequence
  source: /note="Description of Artificial Sequence: Synthetic polynucleotide"
gccttgccagcccgctcagtcaagcctgtacagtgcttttcccacaggcttagtggacgctggagtcacccaaagtcccacacacctgatcaaaacgagaggacagcaagtgactctgagatgctctcctaagtctgggcatgacactgtgtcctggtaccaacaggccctgggtcaggggccccagtttatctttcagtattatgaggaggaagagagacagagaggcaacttccctgatcgattctcaggtcaccagttccctaactatagctctgagctgaatgtgaacgccttgttgctgggggactcggccctctatctctgtgccagcatgatcaagcctgtacagtggtcgacaaaacattcagtacttcggcgccgggacccggctctcagtgctgggtaagctggggccgccgggggaccggggacgagactgcgctcgggtttttgtgcgtcaagcctgtacagtgctgatggcgcgagggaggc

SEQ ID NO: 3323 - DNA, 495 bp, Artificial Sequence
  source: /note="Description of Artificial Sequence: Synthetic polynucleotide"
gccttgccagcccgctcagtcaagcctggatcatccttttcccacaggcttagtggacgctggagtcacccaaagtcccacacacctgatcaaaacgagaggacagcaagtgactctgagatgctctcctaagtctgggcatgacactgtgtcctggtaccaacaggccctgggtcaggggccccagtttatctttcagtattatgaggaggaagagagacagagaggcaacttccctgatcgattctcaggtcaccagttccctaactatagctctgagctgaatgtgaacgccttgttgctgggggactcggccctctatctctgtgccagcatgatcaagcctggatcatcgtcgacgagacccagtacttcgggccaggcacgcggctcctggtgctcggtgagcgcgggctgctggggcgcgggcgcgggcggcttgggtctggtttttgcggggtcaagcctggatcatcctgatggcgcgagggaggc

SEQ ID NO: 3324 - DNA, 495 bp, Artificial Sequence
  source: /note="Description of Artificial Sequence: Synthetic polynucleotide"
gccttgccagcccgctcagtcaagccttattggcgcttttcccacaggcttagtggacgctggagtcacccaaagtcccacacacctgatcaaaacgagaggacagcaagtgactctgagatgctctcctaagtctgggcatgacactgtgtcctggtaccaacaggccctgggtcaggggccccagtttatctttcagtattatgaggaggaagagagacagagaggcaacttccctgatcgattctcaggtcaccagttccctaactatagctctgagctgaatgtgaacgccttgttgctgggggactcggccctctatctctgtgccagcatgatcaagccttattggcggtcgacgggccaacgtcctgactttcggggccggcagcaggctgaccgtgctgggtgagttttcgcgggaccacccgggcggcgggattcaggtggaaggcggcggtcaagccttattggcgctgatggcgcgagggaggc

SEQ ID NO: 3325 - DNA, 495 bp, Artificial Sequence
  source: /note="Description of Artificial Sequence: Synthetic polynucleotide"
gccttgccagcccgctcagtcaagcctaggcttgacttttcccacaggcttagtggacgctggagtcacccaaagtcccacacacctgatcaaaacgagaggacagcaagtgactctgagatgctctcctaagtctgggcatgacactgtgtcctggtaccaacaggccctgggtcaggggccccagtttatctttcagtattatgaggaggaagagagacagagaggcaacttccctgatcgattctcaggtcaccagttccctaactatagctctgagctgaatgtgaacgccttgttgctgggggactcggccctctatctctgtgccagcatgatcaagcctaggcttgagtcgacacgagcagtacttcgggccgggcaccaggctcacggtcacaggtgagattcgggcgtctccccaccttccagcccctcggtccccggagtcggagggtggtcaagcctaggcttgactgatggcgcgagggaggc

SEQ ID NO: 3326 - DNA, 495 bp, Artificial Sequence
  source: /note="Description of Artificial Sequence: Synthetic polynucleotide"
gccttgccagcccgctcagacgtgtgtgacactctcttttcccacaggcccagtggacgctggagtcacccaaagtcccacacacctgatcaaaacgagaggacagcacgtgactctgagatgctctcctatctctgggcacaccagtgtgtcctcgtaccaacaggccctgggtcaggggccccagtttatctttcagtattatgagaaagaagagagaggaagaggaaacttccctgatcaattctcaggtcaccagttccctaactatagctctgagctgaatgtgaacgccttgttgctaggggactcggccctctatctctgtgccagcatgaacgtgtgtgacactctgtcgacactgaagctttctttggacaaggcaccagactcacagttgtaggtaagacatttttcaggttcttttgcagatccgtcacagggaaaagtgggtccacagacgtgtgtgacactctctgatggcgcgagggaggc

SEQ ID NO: 3327 - DNA, 495 bp, Artificial Sequence
  source: /note="Description of Artificial Sequence: Synthetic polynucleotide"
gccttgccagcccgctcagacgtgtgtttcggaaccttttcccacaggcccagtggacgctggagtcacccaaagtcccacacacctgatcaaaacgagaggacagcacgtgactctgagatgctctcctatctctgggcacaccagtgtgtcctcgtaccaacaggccctgggtcaggggccccagtttatctttcagtattatgagaaagaagagagaggaagaggaaacttccctgatcaattctcaggtcaccagttccctaactatagctctgagctgaatgtgaacgccttgttgctaggggactcggccctctatctctgtgccagcatgaacgtgtgtttcggaacgtcgactatggctacaccttcggttcggggaccaggttaaccgttgtaggtaaggctgggggtctctaggaggggtgcgatgagggaggactctgtcctgggaaatacgtgtgtttcggaacctgatggcgcgagggaggc

SEQ ID NO: 3328 - DNA, 495 bp, Artificial Sequence
  source: /note="Description of Artificial Sequence: Synthetic polynucleotide"
gccttgccagcccgctcagacgtgtgtaagtaacgcttttcccacaggcccagtggacgctggagtcacccaaagtcccacacacctgatcaaaacgagaggacagcacgtgactctgagatgctctcctatctctgggcacaccagtgtgtcctcgtaccaacaggccctgggtcaggggccccagtttatctttcagtattatgagaaagaagagagaggaagaggaaacttccctgatcaattctcaggtcaccagttccctaactatagctctgagctgaatgtgaacgccttgttgctaggggactcggccctctatctctgtgccagcatgaacgtgtgtaagtaacggtcgacgaaacaccatatattttggagagggaagttggctcactgttgtaggtgagtaagtcaaggctggacagctgggaacttgcaaaaaggggctggaatccagacgtgtgtaagtaacgctgatggcgcgagggaggc

SEQ ID NO: 3329 - DNA, 495 bp, Artificial Sequence
  source: /note="Description of Artificial Sequence: Synthetic polynucleotide"
gccttgccagcccgctcagacgtgtgtgtctcctacttttcccacaggcccagtggacgctggagtcacccaaagtcccacacacctgatcaaaacgagaggacagcacgtgactctgagatgctctcctatctctgggcacaccagtgtgtcctcgtaccaacaggccctgggtcaggggccccagtttatctttcagtattatgagaaagaagagagaggaagaggaaacttccctgatcaattctcaggtcaccagttccctaactatagctctgagctgaatgtgaacgccttgttgctaggggactcggccctctatctctgtgccagcatgaacgtgtgtgtctcctagtcgacaatgaaaaactgttttttggcagtggaacccagctctctgtcttgggtatgtaaaagacttctttcgggatagtgtatcataaggtcggagttccaggagacgtgtgtgtctcctactgatggcgcgagggaggc

SEQ ID NO: 3330 - DNA, 495 bp, Artificial Sequence
  source: /note="Description of Artificial Sequence: Synthetic polynucleotide"
gccttgccagcccgctcagacgtgtgtagagtgtccttttcccacaggcccagtggacgctggagtcacccaaagtcccacacacctgatcaaaacgagaggacagcacgtgactctgagatgctctcctatctctgggcacaccagtgtgtcctcgtaccaacaggccctgggtcaggggccccagtttatctttcagtattatgagaaagaagagagaggaagaggaaacttccctgatcaattctcaggtcaccagttccctaactatagctctgagctgaatgtgaacgccttgttgctaggggactcggccctctatctctgtgccagcatgaacgtgtgtagagtgtcgtcgacatcagccccagcattttggtgatgggactcgactctccatcctaggtaagttgcagaatcagggtggtatggccattgtcccttgaaggcagagttctctacgtgtgtagagtgtcctgatggcgcgagggaggc

SEQ ID NO: 3331 - DNA, 495 bp, Artificial Sequence
  source: /note="Description of Artificial Sequence: Synthetic polynucleotide"
gccttgccagcccgctcagacgtgtgtgttccgaacttttcccacaggcccagtggacgctggagtcacccaaagtcccacacacctgatcaaaacgagaggacagcacgtgactctgagatgctctcctatctctgggcacaccagtgtgtcctcgtaccaacaggccctgggtcaggggccccagtttatctttcagtattatgagaaagaagagagaggaagaggaaacttccctgatcaattctcaggtcaccagttccctaactatagctctgagctgaatgtgaacgccttgttgctaggggactcggccctctatctctgtgccagcatgaacgtgtgtgttccgaagtcgacataattcacccctccactttgggaacgggaccaggctcactgtgacaggtatgggggctccactcttgactcgggggtgcctgggtttgactgcaatgatacgtgtgtgttccgaactgatggcgcgagggaggc

SEQ ID NO: 3332 - DNA, 495 bp, Artificial Sequence
  source: /note="Description of Artificial Sequence: Synthetic polynucleotide"
gccttgccagcccgctcagacgtgtgtcgttacttcttttcccacaggcccagtggacgctggagtcacccaaagtcccacacacctgatcaaaacgagaggacagcacgtgactctgagatgctctcctatctctgggcacaccagtgtgtcctcgtaccaacaggccctgggtcaggggccccagtttatctttcagtattatgagaaagaagagagaggaagaggaaacttccctgatcaattctcaggtcaccagttccctaactatagctctgagctgaatgtgaacgccttgttgctaggggactcggccctctatctctgtgccagcatgaacgtgtgtcgttacttgtcgacacaatgagcagttcttcgggccagggacacggctcaccgtgctaggtaagaagggggctccaggtgggagagagggtgagcagcccagcctgcacgacccacgtgtgtcgttacttctgatggcgcgagggaggc

SEQ ID NO: 3333 - DNA, 495 bp, Artificial Sequence
  source: /note="Description of Artificial Sequence: Synthetic polynucleotide"
gccttgccagcccgctcagacgtgtgttaggagaccttttcccacaggcccagtggacgctggagtcacccaaagtcccacacacctgatcaaaacgagaggacagcacgtgactctgagatgctctcctatctctgggcacaccagtgtgtcctcgtaccaacaggccctgggtcaggggccccagtttatctttcagtattatgagaaagaagagagaggaagaggaaacttccctgatcaattctcaggtcaccagttccctaactatagctctgagctgaatgtgaacgccttgttgctaggggactcggccctctatctctgtgccagcatgaacgtgtgttaggagacgtcgacaccggggagctgttttttggagaaggctctaggctgaccgtactgggtaaggaggcggttggggctccggagagctccgagagggcgggatgggcagaggacgtgtgttaggagacctgatggcgcgagggaggc

SEQ ID NO: 3334 - DNA, 495 bp, Artificial Sequence
  source: /note="Description of Artificial Sequence: Synthetic polynucleotide"
gccttgccagcccgctcagacgtgtgtgtgtctaccttttcccacaggcccagtggacgctggagtcacccaaagtcccacacacctgatcaaaacgagaggacagcacgtgactctgagatgctctcctatctctgggcacaccagtgtgtcctcgtaccaacaggccctgggtcaggggccccagtttatctttcagtattatgagaaagaagagagaggaagaggaaacttccctgatcaattctcaggtcaccagttccctaactatagctctgagctgaatgtgaacgccttgttgctaggggactcggccctctatctctgtgccagcatgaacgtgtgtgtgtctacgtcgacagatacgcagtattttggcccaggcacccggctgacagtgctcggtaagcgggggctcccgctgaagccccggaactggggagggggcgccccgggacgcacgtgtgtgtgtctacctgatggcgcgagggaggc

SEQ ID NO: 3335 - DNA, 495 bp, Artificial Sequence
  source: /note="Description of Artificial Sequence: Synthetic polynucleotide"
gccttgccagcccgctcagacgtgtgtgtacagtgcttttcccacaggcccagtggacgctggagtcacccaaagtcccacacacctgatcaaaacgagaggacagcacgtgactctgagatgctctcctatctctgggcacaccagtgtgtcctcgtaccaacaggccctgggtcaggggccccagtttatctttcagtattatgagaaagaagagagaggaagaggaaacttccctgatcaattctcaggtcaccagttccctaactatagctctgagctgaatgtgaacgccttgttgctaggggactcggccctctatctctgtgccagcatgaacgtgtgtgtacagtggtcgacaaaacattcagtacttcggcgccgggacccggctctcagtgctgggtaagctggggccgccgggggaccggggacgagactgcgctcgggtttttgtgcgacgtgtgtgtacagtgctgatggcgcgagggaggc

SEQ ID NO: 3336 - DNA, 495 bp, Artificial Sequence
  source: /note="Description of Artificial Sequence: Synthetic polynucleotide"
gccttgccagcccgctcagacgtgtgtggatcatccttttcccacaggcccagtggacgctggagtcacccaaagtcccacacacctgatcaaaacgagaggacagcacgtgactctgagatgctctcctatctctgggcacaccagtgtgtcctcgtaccaacaggccctgggtcaggggccccagtttatctttcagtattatgagaaagaagagagaggaagaggaaacttccctgatcaattctcaggtcaccagttccctaactatagctctgagctgaatgtgaacgccttgttgctaggggactcggccctctatctctgtgccagcatgaacgtgtgtggatcatcgtcgacgagacccagtacttcgggccaggcacgcggctcctggtgctcggtgagcgcgggctgctggggcgcgggcgcgggcggcttgggtctggtttttgcggggacgtgtgtggatcatcctgatggcgcgagggaggc

SEQ ID NO: 3337 - DNA, 495 bp, Artificial Sequence
  source: /note="Description of Artificial Sequence: Synthetic polynucleotide"
gccttgccagcccgctcagacgtgtgttattggcgcttttcccacaggcccagtggacgctggagtcacccaaagtcccacacacctgatcaaaacgagaggacagcacgtgactctgagatgctctcctatctctgggcacaccagtgtgtcctcgtaccaacaggccctgggtcaggggccccagtttatctttcagtattatgagaaagaagagagaggaagaggaaacttccctgatcaattctcaggtcaccagttccctaactatagctctgagctgaatgtgaacgccttgttgctaggggactcggccctctatctctgtgccagcatgaacgtgtgttattggcggtcgacgggccaacgtcctgactttcggggccggcagcaggctgaccgtgctgggtgagttttcgcgggaccacccgggcggcgggattcaggtggaaggcggcggacgtgtgttattggcgctgatggcgcgagggaggc

SEQ ID NO: 3338 - DNA, 495 bp, Artificial Sequence
  source: /note="Description of Artificial Sequence: Synthetic polynucleotide"
gccttgccagcccgctcagacgtgtgtaggcttgacttttcccacaggcccagtggacgctggagtcacccaaagtcccacacacctgatcaaaacgagaggacagcacgtgactctgagatgctctcctatctctgggcacaccagtgtgtcctcgtaccaacaggccctgggtcaggggccccagtttatctttcagtattatgagaaagaagagagaggaagaggaaacttccctgatcaattctcaggtcaccagttccctaactatagctctgagctgaatgtgaacgccttgttgctaggggactcggccctctatctctgtgccagcatgaacgtgtgtaggcttgagtcgacacgagcagtacttcgggccgggcaccaggctcacggtcacaggtgagattcgggcgtctccccaccttccagcccctcggtccccggagtcggagggtggacgtgtgtaggcttgactgatggcgcgagggaggc

SEQ ID NO: 3339 - DNA, 495 bp, Artificial Sequence
  source: /note="Description of Artificial Sequence: Synthetic polynucleotide"
gccttgccagcccgctcagtccgtctagacactctcttttcctgcaggcccagtggaggctggagtcacacaaagtcccacacacctgatcaaaacgagaggacagcaagcgactctgagatgctctcctatctctgggcacaccagtgtgtactggtaccaacaggccctgggtctgggcctccagttcctcctttggtatgacgagggtgaagagagaaacagaggaaacttccctcctagattttcaggtcgccagttccctaattatagctctgagctgaatgtgaacgccttggagctggaggactcggccctgtatctctgtgccagcatgatccgtctagacactctgtcgacactgaagctttctttggacaaggcaccagactcacagttgtaggtaagacatttttcaggttcttttgcagatccgtcacagggaaaagtgggtccacagtccgtctagacactctctgatggcgcgagggaggc

SEQ ID NO: 3340 - DNA, 495 bp, Artificial Sequence
  source: /note="Description of Artificial Sequence: Synthetic polynucleotide"
gccttgccagcccgctcagtccgtctattcggaaccttttcctgcaggcccagtggaggctggagtcacacaaagtcccacacacctgatcaaaacgagaggacagcaagcgactctgagatgctctcctatctctgggcacaccagtgtgtactggtaccaacaggccctgggtctgggcctccagttcctcctttggtatgacgagggtgaagagagaaacagaggaaacttccctcctagattttcaggtcgccagttccctaattatagctctgagctgaatgtgaacgccttggagctggaggactcggccctgtatctctgtgccagcatgatccgtctattcggaacgtcgactatggctacaccttcggttcggggaccaggttaaccgttgtaggtaaggctgggggtctctaggaggggtgcgatgagggaggactctgtcctgggaaattccgtctattcggaacctgatggcgcgagggaggc

SEQ ID NO: 3341 - DNA, 495 bp, Artificial Sequence
  source: /note="Description of Artificial Sequence: Synthetic polynucleotide"
gccttgccagcccgctcagtccgtctaaagtaacgcttttcctgcaggcccagtggaggctggagtcacacaaagtcccacacacctgatcaaaacgagaggacagcaagcgactctgagatgctctcctatctctgggcacaccagtgtgtactggtaccaacaggccctgggtctgggcctccagttcctcctttggtatgacgagggtgaagagagaaacagaggaaacttccctcctagattttcaggtcgccagttccctaattatagctctgagctgaatgtgaacgccttggagctggaggactcggccctgtatctctgtgccagcatgatccgtctaaagtaacggtcgacgaaacaccatatattttggagagggaagttggctcactgttgtaggtgagtaagtcaaggctggacagctgggaacttgcaaaaaggggctggaatccagtccgtctaaagtaacgctgatggcgcgagggaggc

SEQ ID NO: 3342 - DNA, 495 bp, Artificial Sequence
  source: /note="Description of Artificial Sequence: Synthetic polynucleotide"
gccttgccagcccgctcagtccgtctagtctcctacttttcctgcaggcccagtggaggctggagtcacacaaagtcccacacacctgatcaaaacgagaggacagcaagcgactctgagatgctctcctatctctgggcacaccagtgtgtactggtaccaacaggccctgggtctgggcctccagttcctcctttggtatgacgagggtgaagagagaaacagaggaaacttccctcctagattttcaggtcgccagttccctaattatagctctgagctgaatgtgaacgccttggagctggaggactcggccctgtatctctgtgccagcatgatccgtctagtctcctagtcgacaatgaaaaactgttttttggcagtggaacccagctctctgtcttgggtatgtaaaagacttctttcgggatagtgtatcataaggtcggagttccaggagtccgtctagtctcctactgatggcgcgagggaggc

SEQ ID NO: 3343 - DNA, 495 bp, Artificial Sequence
  source: /note="Description of Artificial Sequence: Synthetic polynucleotide"
gccttgccagcccgctcagtccgtctaagagtgtccttttcctgcaggcccagtggaggctggagtcacacaaagtcccacacacctgatcaaaacgagaggacagcaagcgactctgagatgctctcctatctctgggcacaccagtgtgtactggtaccaacaggccctgggtctgggcctccagttcctcctttggtatgacgagggtgaagagagaaacagaggaaacttccctcctagattttcaggtcgccagttccctaattatagctctgagctgaatgtgaacgccttggagctggaggactcggccctgtatctctgtgccagcatgatccgtctaagagtgtcgtcgacatcagccccagcattttggtgatgggactcgactctccatcctaggtaagttgcagaatcagggtggtatggccattgtcccttgaaggcagagttctcttccgtctaagagtgtcctgatggcgcgagggaggc

SEQ ID NO: 3344 - DNA, 495 bp, Artificial Sequence
  source: /note="Description of Artificial Sequence: Synthetic polynucleotide"
gccttgccagcccgctcagtccgtctagttccgaacttttcctgcaggcccagtggaggctggagtcacacaaagtcccacacacctgatcaaaacgagaggacagcaagcgactctgagatgctctcctatctctgggcacaccagtgtgtactggtaccaacaggccctgggtctgggcctccagttcctcctttggtatgacgagggtgaagagagaaacagaggaaacttccctcctagattttcaggtcgccagttccctaattatagctctgagctgaatgtgaacgccttggagctggaggactcggccctgtatctctgtgccagcatgatccgtctagttccgaagtcgacataattcacccctccactttgggaacgggaccaggctcactgtgacaggtatgggggctccactcttgactcgggggtgcctgggtttgactgcaatgattccgtctagttccgaactgatggcgcgagggaggc

SEQ ID NO: 3345 - DNA, 495 bp, Artificial Sequence
  source: /note="Description of Artificial Sequence: Synthetic polynucleotide"
gccttgccagcccgctcagtccgtctacgttacttcttttcctgcaggcccagtggaggctggagtcacacaaagtcccacacacctgatcaaaacgagaggacagcaagcgactctgagatgctctcctatctctgggcacaccagtgtgtactggtaccaacaggccctgggtctgggcctccagttcctcctttggtatgacgagggtgaagagagaaacagaggaaacttccctcctagattttcaggtcgccagttccctaattatagctctgagctgaatgtgaacgccttggagctggaggactcggccctgtatctctgtgccagcatgatccgtctacgttacttgtcgacacaatgagcagttcttcgggccagggacacggctcaccgtgctaggtaagaagggggctccaggtgggagagagggtgagcagcccagcctgcacgaccctccgtctacgttacttctgatggcgcgagggaggc

SEQ ID NO: 3346 - DNA, 495 bp, Artificial Sequence
  source: /note="Description of Artificial Sequence: Synthetic polynucleotide"
gccttgccagcccgctcagtccgtctataggagaccttttcctgcaggcccagtggaggctggagtcacacaaagtcccacacacctgatcaaaacgagaggacagcaagcgactctgagatgctctcctatctctgggcacaccagtgtgtactggtaccaacaggccctgggtctgggcctccagttcctcctttggtatgacgagggtgaagagagaaacagaggaaacttccctcctagattttcaggtcgccagttccctaattatagctctgagctgaatgtgaacgccttggagctggaggactcggccctgtatctctgtgccagcatgatccgtctataggagacgtcgacaccggggagctgttttttggagaaggctctaggctgaccgtactgggtaaggaggcggttggggctccggagagctccgagagggcgggatgggcagaggtccgtctataggagacctgatggcgcgagggaggc

SEQ ID NO: 3347 - DNA, 495 bp, Artificial Sequence
  source: /note="Description of Artificial Sequence: Synthetic polynucleotide"
gccttgccagcccgctcagtccgtctagtgtctaccttttcctgcaggcccagtggaggctggagtcacacaaagtcccacacacctgatcaaaacgagaggacagcaagcgactctgagatgctctcctatctctgggcacaccagtgtgtactggtaccaacaggccctgggtctgggcctccagttcctcctttggtatgacgagggtgaagagagaaacagaggaaacttccctcctagattttcaggtcgccagttccctaattatagctctgagctgaatgtgaacgccttggagctggaggactcggccctgtatctctgtgccagcatgatccgtctagtgtctacgtcgacagatacgcagtattttggcccaggcacccggctgacagtgctcggtaagcgggggctcccgctgaagccccggaactggggagggggcgccccgggacgctccgtctagtgtctacctgatggcgcgagggaggc

SEQ ID NO: 3348 - DNA, 495 bp, Artificial Sequence
  source: /note="Description of Artificial Sequence: Synthetic polynucleotide"
gccttgccagcccgctcagtccgtctagtacagtgcttttcctgcaggcccagtggaggctggagtcacacaaagtcccacacacctgatcaaaacgagaggacagcaagcgactctgagatgctctcctatctctgggcacaccagtgtgtactggtaccaacaggccctgggtctgggcctccagttcctcctttggtatgacgagggtgaagagagaaacagaggaaacttccctcctagattttcaggtcgccagttccctaattatagctctgagctgaatgtgaacgccttggagctggaggactcggccctgtatctctgtgccagcatgatccgtctagtacagtggtcgacaaaacattcagtacttcggcgccgggacccggctctcagtgctgggtaagctggggccgccgggggaccggggacgagactgcgctcgggtttttgtgcgtccgtctagtacagtgctgatggcgcgagggaggc

SEQ ID NO: 3349 - DNA, 495 bp, Artificial Sequence
  source: /note="Description of Artificial Sequence: Synthetic polynucleotide"
gccttgccagcccgctcagtccgtctaggatcatccttttcctgcaggcccagtggaggctggagtcacacaaagtcccacacacctgatcaaaacgagaggacagcaagcgactctgagatgctctcctatctctgggcacaccagtgtgtactggtaccaacaggccctgggtctgggcctccagttcctcctttggtatgacgagggtgaagagagaaacagaggaaacttccctcctagattttcaggtcgccagttccctaattatagctctgagctgaatgtgaacgccttggagctggaggactcggccctgtatctctgtgccagcatgatccgtctaggatcatcgtcgacgagacccagtacttcgggccaggcacgcggctcctggtgctcggtgagcgcgggctgctggggcgcgggcgcgggcggcttgggtctggtttttgcggggtccgtctaggatcatcctgatggcgcgagggaggc

SEQ ID NO: 3350 - DNA, 495 bp, Artificial Sequence
  source: /note="Description of Artificial Sequence: Synthetic polynucleotide"
gccttgccagcccgctcagtccgtctatattggcgcttttcctgcaggcccagtggaggctggagtcacacaaagtcccacacacctgatcaaaacgagaggacagcaagcgactctgagatgctctcctatctctgggcacaccagtgtgtactggtaccaacaggccctgggtctgggcctccagttcctcctttggtatgacgagggtgaagagagaaacagaggaaacttccctcctagattttcaggtcgccagttccctaattatagctctgagctgaatgtgaacgccttggagctggaggactcggccctgtatctctgtgccagcatgatccgtctatattggcggtcgacgggccaacgtcctgactttcggggccggcagcaggctgaccgtgctgggtgagttttcgcgggaccacccgggcggcgggattcaggtggaaggcggcggtccgtctatattggcgctgatggcgcgagggaggc

SEQ ID NO: 3351 - DNA, 495 bp, Artificial Sequence
  source: /note="Description of Artificial Sequence: Synthetic polynucleotide"
gccttgccagcccgctcagtccgtctaaggcttgacttttcctgcaggcccagtggaggctggagtcacacaaagtcccacacacctgatcaaaacgagaggacagcaagcgactctgagatgctctcctatctctgggcacaccagtgtgtactggtaccaacaggccctgggtctgggcctccagttcctcctttggtatgacgagggtgaagagagaaacagaggaaacttccctcctagattttcaggtcgccagttccctaattatagctctgagctgaatgtgaacgccttggagctggaggactcggccctgtatctctgtgccagcatgatccgtctaaggcttgagtcgacacgagcagtacttcgggccgggcaccaggctcacggtcacaggtgagattcgggcgtctccccaccttccagcccctcggtccccggagtcggagggtggtccgtctaaggcttgactgatggcgcgagggaggc

SEQ ID NO: 3352 - DNA, 495 bp, Artificial Sequence
  source: /note="Description of Artificial Sequence: Synthetic polynucleotide"
gccttgccagcccgctcagaagagctggacactctcttctctgcaggtccagtgaatgctggtgtcactcagaccccaaaattccaggtcctgaagacaggacagagcatgacactgcagtgtgcccaggatatgaaccataactccatgtactggtatcgacaagacccaggcatgggactgaggctgatttattactcagcttctgagggtaccactgacaaaggagaagtccccaatggctacaatgtctccagattaaacaaacgggagttctcgctcaggctggagtcggctgctccctcccagacatctgtgtacttctgtgccagcagtgaaagagctggacactctgtcgacactgaagctttctttggacaaggcaccagactcacagttgtaggtaagacatttttcaggttcttttgcagatccgtcacagggaaaagtgggtccacagaagagctggacactctctgatggcgcgagggaggc

SEQ ID NO: 3353 - DNA, 495 bp, Artificial Sequence
  source: /note="Description of Artificial Sequence: Synthetic polynucleotide"
gccttgccagcccgctcagaagagctgttcggaaccttctctgcaggtccagtgaatgctggtgtcactcagaccccaaaattccaggtcctgaagacaggacagagcatgacactgcagtgtgcccaggatatgaaccataactccatgtactggtatcgacaagacccaggcatgggactgaggctgatttattactcagcttctgagggtaccactgacaaaggagaagtccccaatggctacaatgtctccagattaaacaaacgggagttctcgctcaggctggagtcggctgctccctcccagacatctgtgtacttctgtgccagcagtgaaagagctgttcggaacgtcgactatggctacaccttcggttcggggaccaggttaaccgttgtaggtaaggctgggggtctctaggaggggtgcgatgagggaggactctgtcctgggaaataagagctgttcggaacctgatggcgcgagggaggc

SEQ ID NO: 3354 - DNA, 495 bp, Artificial Sequence
  source: /note="Description of Artificial Sequence: Synthetic polynucleotide"
gccttgccagcccgctcagaagagctgaagtaacgcttctctgcaggtccagtgaatgctggtgtcactcagaccccaaaattccaggtcctgaagacaggacagagcatgacactgcagtgtgcccaggatatgaaccataactccatgtactggtatcgacaagacccaggcatgggactgaggctgatttattactcagcttctgagggtaccactgacaaaggagaagtccccaatggctacaatgtctccagattaaacaaacgggagttctcgctcaggctggagtcggctgctccctcccagacatctgtgtacttctgtgccagcagtgaaagagctgaagtaacggtcgacgaaacaccatatattttggagagggaagttggctcactgttgtaggtgagtaagtcaaggctggacagctgggaacttgcaaaaaggggctggaatccagaagagctgaagtaacgctgatggcgcgagggaggc

SEQ ID NO: 3355 - DNA, 495 bp, Artificial Sequence
  source: /note="Description of Artificial Sequence: Synthetic polynucleotide"
gccttgccagcccgctcagaagagctggtctcctacttctctgcaggtccagtgaatgctggtgtcactcagaccccaaaattccaggtcctgaagacaggacagagcatgacactgcagtgtgcccaggatatgaaccataactccatgtactggtatcgacaagacccaggcatgggactgaggctgatttattactcagcttctgagggtaccactgacaaaggagaagtccccaatggctacaatgtctccagattaaacaaacgggagttctcgctcaggctggagtcggctgctccctcccagacatctgtgtacttctgtgccagcagtgaaagagctggtctcctagtcgacaatgaaaaactgttttttggcagtggaacccagctctctgtcttgggtatgtaaaagacttctttcgggatagtgtatcataaggtcggagttccaggagaagagctggtctcctactgatggcgcgagggaggc

SEQ ID NO: 3356 - DNA, 495 bp, Artificial Sequence
  source: /note="Description of Artificial Sequence: Synthetic polynucleotide"
gccttgccagcccgctcagaagagctgagagtgtccttctctgcaggtccagtgaatgctggtgtcactcagaccccaaaattccaggtcctgaagacaggacagagcatgacactgcagtgtgcccaggatatgaaccataactccatgtactggtatcgacaagacccaggcatgggactgaggctgatttattactcagcttctgagggtaccactgacaaaggagaagtccccaatggctacaatgtctccagattaaacaaacgggagttctcgctcaggctggagtcggctgctccctcccagacatctgtgtacttctgtgccagcagtgaaagagctgagagtgtcgtcgacatcagccccagcattttggtgatgggactcgactctccatcctaggtaagttgcagaatcagggtggtatggccattgtcccttgaaggcagagttctctaagagctgagagtgtcctgatggcgcgagggaggc

SEQ ID NO: 3357 - DNA, 495 bp, Artificial Sequence
  source: /note="Description of Artificial Sequence: Synthetic polynucleotide"
gccttgccagcccgctcagaagagctggttccgaacttctctgcaggtccagtgaatgctggtgtcactcagaccccaaaattccaggtcctgaagacaggacagagcatgacactgcagtgtgcccaggatatgaaccataactccatgtactggtatcgacaagacccaggcatgggactgaggctgatttattactcagcttctgagggtaccactgacaaaggagaagtccccaatggctacaatgtctccagattaaacaaacgggagttctcgctcaggctggagtcggctgctccctcccagacatctgtgtacttctgtgccagcagtgaaagagctggttccgaagtcgacataattcacccctccactttgggaacgggaccaggctcactgtgacaggtatgggggctccactcttgactcgggggtgcctgggtttgactgcaatgataagagctggttccgaactgatggcgcgagggaggc

SEQ ID NO: 3358 - DNA, 495 bp, Artificial Sequence
  source: /note="Description of Artificial Sequence: Synthetic polynucleotide"
gccttgccagcccgctcagaagagctgcgttacttcttctctgcaggtccagtgaatgctggtgtcactcagaccccaaaattccaggtcctgaagacaggacagagcatgacactgcagtgtgcccaggatatgaaccataactccatgtactggtatcgacaagacccaggcatgggactgaggctgatttattactcagcttctgagggtaccactgacaaaggagaagtccccaatggctacaatgtctccagattaaacaaacgggagttctcgctcaggctggagtcggctgctccctcccagacatctgtgtacttctgtgccagcagtgaaagagctgcgttacttgtcgacacaatgagcagttcttcgggccagggacacggctcaccgtgctaggtaagaagggggctccaggtgggagagagggtgagcagcccagcctgcacgacccaagagctgcgttacttctgatggcgcgagggaggc

SEQ ID NO: 3359 - DNA, 495 bp, Artificial Sequence
  source: /note="Description of Artificial Sequence: Synthetic polynucleotide"
gccttgccagcccgctcagaagagctgtaggagaccttctctgcaggtccagtgaatgctggtgtcactcagaccccaaaattccaggtcctgaagacaggacagagcatgacactgcagtgtgcccaggatatgaaccataactccatgtactggtatcgacaagacccaggcatgggactgaggctgatttattactcagcttctgagggtaccactgacaaaggagaagtccccaatggctacaatgtctccagattaaacaaacgggagttctcgctcaggctggagtcggctgctccctcccagacatctgtgtacttctgtgccagcagtgaaagagctgtaggagacgtcgacaccggggagctgttttttggagaaggctctaggctgaccgtactgggtaaggaggcggttggggctccggagagctccgagagggcgggatgggcagaggaagagctgtaggagacctgatggcgcgagggaggc

SEQ ID NO: 3360 - DNA, 495 bp, Artificial Sequence
  source: /note="Description of Artificial Sequence: Synthetic polynucleotide"
gccttgccagcccgctcagaagagctggtgtctaccttctctgcaggtccagtgaatgctggtgtcactcagaccccaaaattccaggtcctgaagacaggacagagcatgacactgcagtgtgcccaggatatgaaccataactccatgtactggtatcgacaagacccaggcatgggactgaggctgatttattactcagcttctgagggtaccactgacaaaggagaagtccccaatggctacaatgtctccagattaaacaaacgggagttctcgctcaggctggagtcggctgctccctcccagacatctgtgtacttctgtgccagcagtgaaagagctggtgtctacgtcgacagatacgcagtattttggcccaggcacccggctgacagtgctcggtaagcgggggctcccgctgaagccccggaactggggagggggcgccccgggacgcaagagctggtgtctacctgatggcgcgagggaggc

SEQ ID NO: 3361 - DNA, 495 bp, Artificial Sequence
  source: /note="Description of Artificial Sequence: Synthetic polynucleotide"
gccttgccagcccgctcagaagagctggtacagtgcttctctgcaggtccagtgaatgctggtgtcactcagaccccaaaattccaggtcctgaagacaggacagagcatgacactgcagtgtgcccaggatatgaaccataactccatgtactggtatcgacaagacccaggcatgggactgaggctgatttattactcagcttctgagggtaccactgacaaaggagaagtccccaatggctacaatgtctccagattaaacaaacgggagttctcgctcaggctggagtcggctgctccctcccagacatctgtgtacttctgtgccagcagtgaaagagctggtacagtggtcgacaaaacattcagtacttcggcgccgggacccggctctcagtgctgggtaagctggggccgccgggggaccggggacgagactgcgctcgggtttttgtgcgaagagctggtacagtgctgatggcgcgagggaggc

SEQ ID NO: 3362 - DNA, 495 bp, Artificial Sequence
  source: /note="Description of Artificial Sequence: Synthetic polynucleotide"
gccttgccagcccgctcagaagagctgggatcatccttctctgcaggtccagtgaatgctggtgtcactcagaccccaaaattccaggtcctgaagacaggacagagcatgacactgcagtgtgcccaggatatgaaccataactccatgtactggtatcgacaagacccaggcatgggactgaggctgatttattactcagcttctgagggtaccactgacaaaggagaagtccccaatggctacaatgtctccagattaaacaaacgggagttctcgctcaggctggagtcggctgctccctcccagacatctgtgtacttctgtgccagcagtgaaagagctgggatcatcgtcgacgagacccagtacttcgggccaggcacgcggctcctggtgctcggtgagcgcgggctgctggggcgcgggcgcgggcggcttgggtctggtttttgcggggaagagctgggatcatcctgatggcgcgagggaggc

SEQ ID NO: 3363 - DNA, 495 bp, Artificial Sequence
  source: /note="Description of Artificial Sequence: Synthetic polynucleotide"
gccttgccagcccgctcagaagagctgtattggcgcttctctgcaggtccagtgaatgctggtgtcactcagaccccaaaattccaggtcctgaagacaggacagagcatgacactgcagtgtgcccaggatatgaaccataactccatgtactggtatcgacaagacccaggcatgggactgaggctgatttattactcagcttctgagggtaccactgacaaaggagaagtccccaatggctacaatgtctccagattaaacaaacgggagttctcgctcaggctggagtcggctgctccctcccagacatctgtgtacttctgtgccagcagtgaaagagctgtattggcggtcgacgggccaacgtcctgactttcggggccggcagcaggctgaccgtgctgggtgagttttcgcgggaccacccgggcggcgggattcaggtggaaggcggcggaagagctgtattggcgctgatggcgcgagggaggc

SEQ ID NO: 3364 - DNA, 495 bp, Artificial Sequence
  source: /note="Description of Artificial Sequence: Synthetic polynucleotide"
gccttgccagcccgctcagaagagctgaggcttgacttctctgcaggtccagtgaatgctggtgtcactcagaccccaaaattccaggtcctgaagacaggacagagcatgacactgcagtgtgcccaggatatgaaccataactccatgtactggtatcgacaagacccaggcatgggactgaggctgatttattactcagcttctgagggtaccactgacaaaggagaagtccccaatggctacaatgtctccagattaaacaaacgggagttctcgctcaggctggagtcggctgctccctcccagacatctgtgtacttctgtgccagcagtgaaagagctgaggcttgagtcgacacgagcagtacttcgggccgggcaccaggctcacggtcacaggtgagattcgggcgtctccccaccttccagcccctcggtccccggagtcggagggtggaagagctgaggcttgactgatggcgcgagggaggc

SEQ ID NO: 3365 - DNA, 495 bp, Artificial Sequence
  source: /note="Description of Artificial Sequence: Synthetic polynucleotide"
gccttgccagcccgctcagtcagatgcgacactctcttctctgcaggtccagtgaatgctggtgtcactcagaccccaaaattccgggtcctgaagacaggacagagcatgacactgctgtgtgcccaggatatgaaccatgaatacatgtactggtatcgacaagacccaggcatggggctgaggctgattcattactcagttggtgagggtacaactgccaaaggagaggtccctgatggctacaatgtctccagattaaaaaaacagaatttcctgctggggttggagtcggctgctccctcccaaacatctgtgtacttctgtgccagcagtgatcagatgcgacactctgtcgacactgaagctttctttggacaaggcaccagactcacagttgtaggtaagacatttttcaggttcttttgcagatccgtcacagggaaaagtgggtccacagtcagatgcgacactctctgatggcgcgagggaggc

SEQ ID NO: 3366 - DNA, 495 bp, Artificial Sequence
  source: /note="Description of Artificial Sequence: Synthetic polynucleotide"
gccttgccagcccgctcagtcagatgcttcggaaccttctctgcaggtccagtgaatgctggtgtcactcagaccccaaaattccgggtcctgaagacaggacagagcatgacactgctgtgtgcccaggatatgaaccatgaatacatgtactggtatcgacaagacccaggcatggggctgaggctgattcattactcagttggtgagggtacaactgccaaaggagaggtccctgatggctacaatgtctccagattaaaaaaacagaatttcctgctggggttggagtcggctgctccctcccaaacatctgtgtacttctgtgccagcagtgatcagatgcttcggaacgtcgactatggctacaccttcggttcggggaccaggttaaccgttgtaggtaaggctgggggtctctaggaggggtgcgatgagggaggactctgtcctgggaaattcagatgcttcggaacctgatggcgcgagggaggc

SEQ ID NO: 3367 - DNA, 495 bp, Artificial Sequence
  source: /note="Description of Artificial Sequence: Synthetic polynucleotide"
gccttgccagcccgctcagtcagatgcaagtaacgcttctctgcaggtccagtgaatgctggtgtcactcagaccccaaaattccgggtcctgaagacaggacagagcatgacactgctgtgtgcccaggatatgaaccatgaatacatgtactggtatcgacaagacccaggcatggggctgaggctgattcattactcagttggtgagggtacaactgccaaaggagaggtccctgatggctacaatgtctccagattaaaaaaacagaatttcctgctggggttggagtcggctgctccctcccaaacatctgtgtacttctgtgccagcagtgatcagatgcaagtaacggtcgacgaaacaccatatattttggagagggaagttggctcactgttgtaggtgagtaagtcaaggctggacagctgggaacttgcaaaaaggggctggaatccagtcagatgcaagtaacgctgatggcgcgagggaggc

SEQ ID NO: 3368 - DNA, 495 bp, Artificial Sequence
  source: /note="Description of Artificial Sequence: Synthetic polynucleotide"
gccttgccagcccgctcagtcagatgcgtctcctacttctctgcaggtccagtgaatgctggtgtcactcagaccccaaaattccgggtcctgaagacaggacagagcatgacactgctgtgtgcccaggatatgaaccatgaatacatgtactggtatcgacaagacccaggcatggggctgaggctgattcattactcagttggtgagggtacaactgccaaaggagaggtccctgatggctacaatgtctccagattaaaaaaacagaatttcctgctggggttggagtcggctgctccctcccaaacatctgtgtacttctgtgccagcagtgatcagatgcgtctcctagtcgacaatgaaaaactgttttttggcagtggaacccagctctctgtcttgggtatgtaaaagacttctttcgggatagtgtatcataaggtcggagttccaggagtcagatgcgtctcctactgatggcgcgagggaggc

SEQ ID NO: 3369 - DNA, 495 bp, Artificial Sequence
  source: /note="Description of Artificial Sequence: Synthetic polynucleotide"
gccttgccagcccgctcagtcagatgcagagtgtccttctctgcaggtccagtgaatgctggtgtcactcagaccccaaaattccgggtcctgaagacaggacagagcatgacactgctgtgtgcccaggatatgaaccatgaatacatgtactggtatcgacaagacccaggcatggggctgaggctgattcattactcagttggtgagggtacaactgccaaaggagaggtccctgatggctacaatgtctccagattaaaaaaacagaatttcctgctggggttggagtcggctgctccctcccaaacatctgtgtacttctgtgccagcagtgatcagatgcagagtgtcgtcgacatcagccccagcattttggtgatgggactcgactctccatcctaggtaagttgcagaatcagggtggtatggccattgtcccttgaaggcagagttctcttcagatgcagagtgtcctgatggcgcgagggaggc

SEQ ID NO: 3370 - DNA, 495 bp, Artificial Sequence
  source: /note="Description of Artificial Sequence: Synthetic polynucleotide"
gccttgccagcccgctcagtcagatgcgttccgaacttctctgcaggtccagtgaatgctggtgtcactcagaccccaaaattccgggtcctgaagacaggacagagcatgacactgctgtgtgcccaggatatgaaccatgaatacatgtactggtatcgacaagacccaggcatggggctgaggctgattcattactcagttggtgagggtacaactgccaaaggagaggtccctgatggctacaatgtctccagattaaaaaaacagaatttcctgctggggttggagtcggctgctccctcccaaacatctgtgtacttctgtgccagcagtgatcagatgcgttccgaagtcgacataattcacccctccactttgggaacgggaccaggctcactgtgacaggtatgggggctccactcttgactcgggggtgcctgggtttgactgcaatgattcagatgcgttccgaactgatggcgcgagggaggc

SEQ ID NO: 3371 - DNA, 495 bp, Artificial Sequence
  source: /note="Description of Artificial Sequence: Synthetic polynucleotide"
gccttgccagcccgctcagtcagatgccgttacttcttctctgcaggtccagtgaatgctggtgtcactcagaccccaaaattccgggtcctgaagacaggacagagcatgacactgctgtgtgcccaggatatgaaccatgaatacatgtactggtatcgacaagacccaggcatggggctgaggctgattcattactcagttggtgagggtacaactgccaaaggagaggtccctgatggctacaatgtctccagattaaaaaaacagaatttcctgctggggttggagtcggctgctccctcccaaacatctgtgtacttctgtgccagcagtgatcagatgccgttacttgtcgacacaatgagcagttcttcgggccagggacacggctcaccgtgctaggtaagaagggggctccaggtgggagagagggtgagcagcccagcctgcacgaccctcagatgccgttacttctgatggcgcgagggaggc

SEQ ID NO: 3372 - DNA, 495 bp, Artificial Sequence
  source: /note="Description of Artificial Sequence: Synthetic polynucleotide"
gccttgccagcccgctcagtcagatgctaggagaccttctctgcaggtccagtgaatgctggtgtcactcagaccccaaaattccgggtcctgaagacaggacagagcatgacactgctgtgtgcccaggatatgaaccatgaatacatgtactggtatcgacaagacccaggcatggggctgaggctgattcattactcagttggtgagggtacaactgccaaaggagaggtccctgatggctacaatgtctccagattaaaaaaacagaatttcctgctggggttggagtcggctgctccctcccaaacatctgtgtacttctgtgccagcagtgatcagatgctaggagacgtcgacaccggggagctgttttttggagaaggctctaggctgaccgtactgggtaaggaggcggttggggctccggagagctccgagagggcgggatgggcagaggtcagatgctaggagacctgatggcgcgagggaggc

SEQ ID NO: 3373 - DNA, 495 bp, Artificial Sequence
  source: /note="Description of Artificial Sequence: Synthetic polynucleotide"
gccttgccagcccgctcagtcagatgcgtgtctaccttctctgcaggtccagtgaatgctggtgtcactcagaccccaaaattccgggtcctgaagacaggacagagcatgacactgctgtgtgcccaggatatgaaccatgaatacatgtactggtatcgacaagacccaggcatggggctgaggctgattcattactcagttggtgagggtacaactgccaaaggagaggtccctgatggctacaatgtctccagattaaaaaaacagaatttcctgctggggttggagtcggctgctccctcccaaacatctgtgtacttctgtgccagcagtgatcagatgcgtgtctacgtcgacagatacgcagtattttggcccaggcacccggctgacagtgctcggtaagcgggggctcccgctgaagccccggaactggggagggggcgccccgggacgctcagatgcgtgtctacctgatggcgcgagggaggc

SEQ ID NO: 3374 - DNA, 495 bp, Artificial Sequence
  source: /note="Description of Artificial Sequence: Synthetic polynucleotide"
gccttgccagcccgctcagtcagatgcgtacagtgcttctctgcaggtccagtgaatgctggtgtcactcagaccccaaaattccgggtcctgaagacaggacagagcatgacactgctgtgtgcccaggatatgaaccatgaatacatgtactggtatcgacaagacccaggcatggggctgaggctgattcattactcagttggtgagggtacaactgccaaaggagaggtccctgatggctacaatgtctccagattaaaaaaacagaatttcctgctggggttggagtcggctgctccctcccaaacatctgtgtacttctgtgccagcagtgatcagatgcgtacagtggtcgacaaaacattcagtacttcggcgccgggacccggctctcagtgctgggtaagctggggccgccgggggaccggggacgagactgcgctcgggtttttgtgcgtcagatgcgtacagtgctgatggcgcgagggaggc

SEQ ID NO: 3375 - DNA, 495 bp, Artificial Sequence
  source: /note="Description of Artificial Sequence: Synthetic polynucleotide"
gccttgccagcccgctcagtcagatgcggatcatccttctctgcaggtccagtgaatgctggtgtcactcagaccccaaaattccgggtcctgaagacaggacagagcatgacactgctgtgtgcccaggatatgaaccatgaatacatgtactggtatcgacaagacccaggcatggggctgaggctgattcattactcagttggtgagggtacaactgccaaaggagaggtccctgatggctacaatgtctccagattaaaaaaacagaatttcctgctggggttggagtcggctgctccctcccaaacatctgtgtacttctgtgccagcagtgatcagatgcggatcatcgtcgacgagacccagtacttcgggccaggcacgcggctcctggtgctcggtgagcgcgggctgctggggcgcgggcgcgggcggcttgggtctggtttttgcggggtcagatgcggatcatcctgatggcgcgagggaggc

SEQ ID NO: 3376 - DNA, 495 bp, Artificial Sequence
  source: /note="Description of Artificial Sequence: Synthetic polynucleotide"
gccttgccagcccgctcagtcagatgctattggcgcttctctgcaggtccagtgaatgctggtgtcactcagaccccaaaattccgggtcctgaagacaggacagagcatgacactgctgtgtgcccaggatatgaaccatgaatacatgtactggtatcgacaagacccaggcatggggctgaggctgattcattactcagttggtgagggtacaactgccaaaggagaggtccctgatggctacaatgtctccagattaaaaaaacagaatttcctgctggggttggagtcggctgctccctcccaaacatctgtgtacttctgtgccagcagtgatcagatgctattggcggtcgacgggccaacgtcctgactttcggggccggcagcaggctgaccgtgctgggtgagttttcgcgggaccacccgggcggcgggattcaggtggaaggcggcggtcagatgctattggcgctgatggcgcgagggaggc

SEQ ID NO: 3377 - DNA, 495 bp, Artificial Sequence
  source: /note="Description of Artificial Sequence: Synthetic polynucleotide"
gccttgccagcccgctcagtcagatgcaggcttgacttctctgcaggtccagtgaatgctggtgtcactcagaccccaaaattccgggtcctgaagacaggacagagcatgacactgctgtgtgcccaggatatgaaccatgaatacatgtactggtatcgacaagacccaggcatggggctgaggctgattcattactcagttggtgagggtacaactgccaaaggagaggtccctgatggctacaatgtctccagattaaaaaaacagaatttcctgctggggttggagtcggctgctccctcccaaacatctgtgtacttctgtgccagcagtgatcagatgcaggcttgagtcgacacgagcagtacttcgggccgggcaccaggctcacggtcacaggtgagattcgggcgtctccccaccttccagcccctcggtccccggagtcggagggtggtcagatgcaggcttgactgatggcgcgagggaggc

SEQ ID NO: 3378 - DNA, 495 bp, Artificial Sequence
  source: /note="Description of Artificial Sequence: Synthetic polynucleotide"
gccttgccagcccgctcaggtgtagcagacactctcttctctgtaggtccagtgattgctgggatcacccaggcaccaacatctcagatcctggcagcaggacggcgcatgacactgagatgtacccaggatatgagacataatgccatgtactggtatagacaagatctaggactggggctaaggctcatccattattcaaatactgcaggtaccactggcaaaggagaagtccctgatggttatagtgtctccagagcaaacacagatgatttccccctcacgttggcgtctgctgtaccctctcagacatctgtgtacttctgtgccagcagtgagtgtagcagacactctgtcgacactgaagctttctttggacaaggcaccagactcacagttgtaggtaagacatttttcaggttcttttgcagatccgtcacagggaaaagtgggtccacaggtgtagcagacactctctgatggcgcgagggaggc

SEQ ID NO: 3379 - DNA, 495 bp, Artificial Sequence
  source: /note="Description of Artificial Sequence: Synthetic polynucleotide"
gccttgccagcccgctcaggtgtagcattcggaaccttctctgtaggtccagtgattgctgggatcacccaggcaccaacatctcagatcctggcagcaggacggcgcatgacactgagatgtacccaggatatgagacataatgccatgtactggtatagacaagatctaggactggggctaaggctcatccattattcaaatactgcaggtaccactggcaaaggagaagtccctgatggttatagtgtctccagagcaaacacagatgatttccccctcacgttggcgtctgctgtaccctctcagacatctgtgtacttctgtgccagcagtgagtgtagcattcggaacgtcgactatggctacaccttcggttcggggaccaggttaaccgttgtaggtaaggctgggggtctctaggaggggtgcgatgagggaggactctgtcctgggaaatgtgtagcattcggaacctgatggcgcgagggaggc

SEQ ID NO: 3380 - DNA, 495 bp, Artificial Sequence
  source: /note="Description of Artificial Sequence: Synthetic polynucleotide"
gccttgccagcccgctcaggtgtagcaaagtaacgcttctctgtaggtccagtgattgctgggatcacccaggcaccaacatctcagatcctggcagcaggacggcgcatgacactgagatgtacccaggatatgagacataatgccatgtactggtatagacaagatctaggactggggctaaggctcatccattattcaaatactgcaggtaccactggcaaaggagaagtccctgatggttatagtgtctccagagcaaacacagatgatttccccctcacgttggcgtctgctgtaccctctcagacatctgtgtacttctgtgccagcagtgagtgtagcaaagtaacggtcgacgaaacaccatatattttggagagggaagttggctcactgttgtaggtgagtaagtcaaggctggacagctgggaacttgcaaaaaggggctggaatccaggtgtagcaaagtaacgctgatggcgcgagggaggc

SEQ ID NO: 3381 - DNA, 495 bp, Artificial Sequence
  source: /note="Description of Artificial Sequence: Synthetic polynucleotide"
gccttgccagcccgctcaggtgtagcagtctcctacttctctgtaggtccagtgattgctgggatcacccaggcaccaacatctcagatcctggcagcaggacggcgcatgacactgagatgtacccaggatatgagacataatgccatgtactggtatagacaagatctaggactggggctaaggctcatccattattcaaatactgcaggtaccactggcaaaggagaagtccctgatggttatagtgtctccagagcaaacacagatgatttccccctcacgttggcgtctgctgtaccctctcagacatctgtgtacttctgtgccagcagtgagtgtagcagtctcctagtcgacaatgaaaaactgttttttggcagtggaacccagctctctgtcttgggtatgtaaaagacttctttcgggatagtgtatcataaggtcggagttccaggaggtgtagcagtctcctactgatggcgcgagggaggc

SEQ ID NO: 3382 - DNA, 495 bp, Artificial Sequence
  source: /note="Description of Artificial Sequence: Synthetic polynucleotide"
gccttgccagcccgctcaggtgtagcaagagtgtccttctctgtaggtccagtgattgctgggatcacccaggcaccaacatctcagatcctggcagcaggacggcgcatgacactgagatgtacccaggatatgagacataatgccatgtactggtatagacaagatctaggactggggctaaggctcatccattattcaaatactgcaggtaccactggcaaaggagaagtccctgatggttatagtgtctccagagcaaacacagatgatttccccctcacgttggcgtctgctgtaccctctcagacatctgtgtacttctgtgccagcagtgagtgtagcaagagtgtcgtcgacatcagccccagcattttggtgatgggactcgactctccatcctaggtaagttgcagaatcagggtggtatggccattgtcccttgaaggcagagttctctgtgtagcaagagtgtcctgatggcgcgagggaggc

SEQ ID NO: 3383 - DNA, 495 bp, Artificial Sequence
  source: /note="Description of Artificial Sequence: Synthetic polynucleotide"
gccttgccagcccgctcaggtgtagcagttccgaacttctctgtaggtccagtgattgctgggatcacccaggcaccaacatctcagatcctggcagcaggacggcgcatgacactgagatgtacccaggatatgagacataatgccatgtactggtatagacaagatctaggactggggctaaggctcatccattattcaaatactgcaggtaccactggcaaaggagaagtccctgatggttatagtgtctccagagcaaacacagatgatttccccctcacgttggcgtctgctgtaccctctcagacatctgtgtacttctgtgccagcagtgagtgtagcagttccgaagtcgacataattcacccctccactttgggaacgggaccaggctcactgtgacaggtatgggggctccactcttgactcgggggtgcctgggtttgactgcaatgatgtgtagcagttccgaactgatggcgcgagggaggc

SEQ ID NO: 3384 - DNA, 495 bp, Artificial Sequence
  source: /note="Description of Artificial Sequence: Synthetic polynucleotide"
gccttgccagcccgctcaggtgtagcacgttacttcttctctgtaggtccagtgattgctgggatcacccaggcaccaacatctcagatcctggcagcaggacggcgcatgacactgagatgtacccaggatatgagacataatgccatgtactggtatagacaagatctaggactggggctaaggctcatccattattcaaatactgcaggtaccactggcaaaggagaagtccctgatggttatagtgtctccagagcaaacacagatgatttccccctcacgttggcgtctgctgtaccctctcagacatctgtgtacttctgtgccagcagtgagtgtagcacgttacttgtcgacacaatgagcagttcttcgggccagggacacggctcaccgtgctaggtaagaagggggctccaggtgggagagagggtgagcagcccagcctgcacgacccgtgtagcacgttacttctgatggcgcgagggaggc

SEQ ID NO: 3385 - DNA, 495 bp, Artificial Sequence
  source: /note="Description of Artificial Sequence: Synthetic polynucleotide"
gccttgccagcccgctcaggtgtagcataggagaccttctctgtaggtccagtgattgctgggatcacccaggcaccaacatctcagatcctggcagcaggacggcgcatgacactgagatgtacccaggatatgagacataatgccatgtactggtatagacaagatctaggactggggctaaggctcatccattattcaaatactgcaggtaccactggcaaaggagaagtccctgatggttatagtgtctccagagcaaacacagatgatttccccctcacgttggcgtctgctgtaccctctcagacatctgtgtacttctgtgccagcagtgagtgtagcataggagacgtcgacaccggggagctgttttttggagaaggctctaggctgaccgtactgggtaaggaggcggttggggctccggagagctccgagagggcgggatgggcagagggtgtagcataggagacctgatggcgcgagggaggc

SEQ ID NO: 3386 - DNA, 495 bp, Artificial Sequence
  source: /note="Description of Artificial Sequence: Synthetic polynucleotide"
gccttgccagcccgctcaggtgtagcagtgtctaccttctctgtaggtccagtgattgctgggatcacccaggcaccaacatctcagatcctggcagcaggacggcgcatgacactgagatgtacccaggatatgagacataatgccatgtactggtatagacaagatctaggactggggctaaggctcatccattattcaaatactgcaggtaccactggcaaaggagaagtccctgatggttatagtgtctccagagcaaacacagatgatttccccctcacgttggcgtctgctgtaccctctcagacatctgtgtacttctgtgccagcagtgagtgtagcagtgtctacgtcgacagatacgcagtattttggcccaggcacccggctgacagtgctcggtaagcgggggctcccgctgaagccccggaactggggagggggcgccccgggacgcgtgtagcagtgtctacctgatggcgcgagggaggc

SEQ ID NO: 3387 - DNA, 495 bp, Artificial Sequence
  source: /note="Description of Artificial Sequence: Synthetic polynucleotide"
gccttgccagcccgctcaggtgtagcagtacagtgcttctctgtaggtccagtgattgctgggatcacccaggcaccaacatctcagatcctggcagcaggacggcgcatgacactgagatgtacccaggatatgagacataatgccatgtactggtatagacaagatctaggactggggctaaggctcatccattattcaaatactgcaggtaccactggcaaaggagaagtccctgatggttatagtgtctccagagcaaacacagatgatttccccctcacgttggcgtctgctgtaccctctcagacatctgtgtacttctgtgccagcagtgagtgtagcagtacagtggtcgacaaaacattcagtacttcggcgccgggacccggctctcagtgctgggtaagctggggccgccgggggaccggggacgagactgcgctcgggtttttgtgcggtgtagcagtacagtgctgatggcgcgagggaggc

SEQ ID NO: 3388 - DNA, 495 bp, Artificial Sequence
  source: /note="Description of Artificial Sequence: Synthetic polynucleotide"
gccttgccagcccgctcaggtgtagcaggatcatccttctctgtaggtccagtgattgctgggatcacccaggcaccaacatctcagatcctggcagcaggacggcgcatgacactgagatgtacccaggatatgagacataatgccatgtactggtatagacaagatctaggactggggctaaggctcatccattattcaaatactgcaggtaccactggcaaaggagaagtccctgatggttatagtgtctccagagcaaacacagatgatttccccctcacgttggcgtctgctgtaccctctcagacatctgtgtacttctgtgccagcagtgagtgtagcaggatcatcgtcgacgagacccagtacttcgggccaggcacgcggctcctggtgctcggtgagcgcgggctgctggggcgcgggcgcgggcggcttgggtctggtttttgcgggggtgtagcaggatcatcctgatggcgcgagggaggc

SEQ ID NO: 3389 - DNA, 495 bp, Artificial Sequence
  source: /note="Description of Artificial Sequence: Synthetic polynucleotide"
gccttgccagcccgctcaggtgtagcatattggcgcttctctgtaggtccagtgattgctgggatcacccaggcaccaacatctcagatcctggcagcaggacggcgcatgacactgagatgtacccaggatatgagacataatgccatgtactggtatagacaagatctaggactggggctaaggctcatccattattcaaatactgcaggtaccactggcaaaggagaagtccctgatggttatagtgtctccagagcaaacacagatgatttccccctcacgttggcgtctgctgtaccctctcagacatctgtgtacttctgtgccagcagtgagtgtagcatattggcggtcgacgggccaacgtcctgactttcggggccggcagcaggctgaccgtgctgggtgagttttcgcgggaccacccgggcggcgggattcaggtggaaggcggcgggtgtagcatattggcgctgatggcgcgagggaggc

SEQ ID NO: 3390 - DNA, 495 bp, Artificial Sequence
  source: /note="Description of Artificial Sequence: Synthetic polynucleotide"
gccttgccagcccgctcaggtgtagcaaggcttgacttctctgtaggtccagtgattgctgggatcacccaggcaccaacatctcagatcctggcagcaggacggcgcatgacactgagatgtacccaggatatgagacataatgccatgtactggtatagacaagatctaggactggggctaaggctcatccattattcaaatactgcaggtaccactggcaaaggagaagtccctgatggttatagtgtctccagagcaaacacagatgatttccccctcacgttggcgtctgctgtaccctctcagacatctgtgtacttctgtgccagcagtgagtgtagcaaggcttgagtcgacacgagcagtacttcgggccgggcaccaggctcacggtcacaggtgagattcgggcgtctccccaccttccagcccctcggtccccggagtcggagggtgggtgtagcaaggcttgactgatggcgcgagggaggc

SEQ ID NO: 3391 - DNA, 495 bp, Artificial Sequence
  source: /note="Description of Artificial Sequence: Synthetic polynucleotide"
gccttgccagcccgctcagtggcagttgacactctcttctctgcaggtccagtgaatgctggtgtcactcagaccccaaaattccaggtcctgaagacaggacagagcatgacactgcagtgtgcccaggatatgaaccatgaatacatgtcctggtatcgacaagacccaggcatggggctgaggctgattcattactcagttggtgctggtatcactgaccaaggagaagtccccaatggctacaatgtctccagatcaaccacagaggatttcccgctcaggctgctgtcggctgctccctcccagacatctgtgtacttctgtgccagcagtgatggcagttgacactctgtcgacactgaagctttctttggacaaggcaccagactcacagttgtaggtaagacatttttcaggttcttttgcagatccgtcacagggaaaagtgggtccacagtggcagttgacactctctgatggcgcgagggaggc

SEQ ID NO: 3392 - DNA, 495 bp, Artificial Sequence
  source: /note="Description of Artificial Sequence: Synthetic polynucleotide"
gccttgccagcccgctcagtggcagttttcggaaccttctctgcaggtccagtgaatgctggtgtcactcagaccccaaaattccaggtcctgaagacaggacagagcatgacactgcagtgtgcccaggatatgaaccatgaatacatgtcctggtatcgacaagacccaggcatggggctgaggctgattcattactcagttggtgctggtatcactgaccaaggagaagtccccaatggctacaatgtctccagatcaaccacagaggatttcccgctcaggctgctgtcggctgctccctcccagacatctgtgtacttctgtgccagcagtgatggcagttttcggaacgtcgactatggctacaccttcggttcggggaccaggttaaccgttgtaggtaaggctgggggtctctaggaggggtgcgatgagggaggactctgtcctgggaaattggcagttttcggaacctgatggcgcgagggaggc

SEQ ID NO: 3393 - DNA, 495 bp, Artificial Sequence
  source: /note="Description of Artificial Sequence: Synthetic polynucleotide"
gccttgccagcccgctcagtggcagttaagtaacgcttctctgcaggtccagtgaatgctggtgtcactcagaccccaaaattccaggtcctgaagacaggacagagcatgacactgcagtgtgcccaggatatgaaccatgaatacatgtcctggtatcgacaagacccaggcatggggctgaggctgattcattactcagttggtgctggtatcactgaccaaggagaagtccccaatggctacaatgtctccagatcaaccacagaggatttcccgctcaggctgctgtcggctgctccctcccagacatctgtgtacttctgtgccagcagtgatggcagttaagtaacggtcgacgaaacaccatatattttggagagggaagttggctcactgttgtaggtgagtaagtcaaggctggacagctgggaacttgcaaaaaggggctggaatccagtggcagttaagtaacgctgatggcgcgagggaggc

SEQ ID NO: 3394 - DNA, 495 bp, Artificial Sequence
  source: /note="Description of Artificial Sequence: Synthetic polynucleotide"
gccttgccagcccgctcagtggcagttgtctcctacttctctgcaggtccagtgaatgctggtgtcactcagaccccaaaattccaggtcctgaagacaggacagagcatgacactgcagtgtgcccaggatatgaaccatgaatacatgtcctggtatcgacaagacccaggcatggggctgaggctgattcattactcagttggtgctggtatcactgaccaaggagaagtccccaatggctacaatgtctccagatcaaccacagaggatttcccgctcaggctgctgtcggctgctccctcccagacatctgtgtacttctgtgccagcagtgatggcagttgtctcctagtcgacaatgaaaaactgttttttggcagtggaacccagctctctgtcttgggtatgtaaaagacttctttcgggatagtgtatcataaggtcggagttccaggagtggcagttgtctcctactgatggcgcgagggaggc

SEQ ID NO: 3395 - DNA, 495 bp, Artificial Sequence
  source: /note="Description of Artificial Sequence: Synthetic polynucleotide"
gccttgccagcccgctcagtggcagttagagtgtccttctctgcaggtccagtgaatgctggtgtcactcagaccccaaaattccaggtcctgaagacaggacagagcatgacactgcagtgtgcccaggatatgaaccatgaatacatgtcctggtatcgacaagacccaggcatggggctgaggctgattcattactcagttggtgctggtatcactgaccaaggagaagtccccaatggctacaatgtctccagatcaaccacagaggatttcccgctcaggctgctgtcggctgctccctcccagacatctgtgtacttctgtgccagcagtgatggcagttagagtgtcgtcgacatcagccccagcattttggtgatgggactcgactctccatcctaggtaagttgcagaatcagggtggtatggccattgtcccttgaaggcagagttctcttggcagttagagtgtcctgatggcgcgagggaggc

SEQ ID NO: 3396 - DNA, 495 bp, Artificial Sequence
  source: /note="Description of Artificial Sequence: Synthetic polynucleotide"
gccttgccagcccgctcagtggcagttgttccgaacttctctgcaggtccagtgaatgctggtgtcactcagaccccaaaattccaggtcctgaagacaggacagagcatgacactgcagtgtgcccaggatatgaaccatgaatacatgtcctggtatcgacaagacccaggcatggggctgaggctgattcattactcagttggtgctggtatcactgaccaaggagaagtccccaatggctacaatgtctccagatcaaccacagaggatttcccgctcaggctgctgtcggctgctccctcccagacatctgtgtacttctgtgccagcagtgatggcagttgttccgaagtcgacataattcacccctccactttgggaacgggaccaggctcactgtgacaggtatgggggctccactcttgactcgggggtgcctgggtttgactgcaatgattggcagttgttccgaactgatggcgcgagggaggc

SEQ ID NO: 3397 - DNA, 495 bp, Artificial Sequence
  source: /note="Description of Artificial Sequence: Synthetic polynucleotide"
gccttgccagcccgctcagtggcagttcgttacttcttctctgcaggtccagtgaatgctggtgtcactcagaccccaaaattccaggtcctgaagacaggacagagcatgacactgcagtgtgcccaggatatgaaccatgaatacatgtcctggtatcgacaagacccaggcatggggctgaggctgattcattactcagttggtgctggtatcactgaccaaggagaagtccccaatggctacaatgtctccagatcaaccacagaggatttcccgctcaggctgctgtcggctgctccctcccagacatctgtgtacttctgtgccagcagtgatggcagttcgttacttgtcgacacaatgagcagttcttcgggccagggacacggctcaccgtgctaggtaagaagggggctccaggtgggagagagggtgagcagcccagcctgcacgaccctggcagttcgttacttctgatggcgcgagggaggc

SEQ ID NO: 3398 - DNA, 495 bp, Artificial Sequence
  source: /note="Description of Artificial Sequence: Synthetic polynucleotide"
gccttgccagcccgctcagtggcagtttaggagaccttctctgcaggtccagtgaatgctggtgtcactcagaccccaaaattccaggtcctgaagacaggacagagcatgacactgcagtgtgcccaggatatgaaccatgaatacatgtcctggtatcgacaagacccaggcatggggctgaggctgattcattactcagttggtgctggtatcactgaccaaggagaagtccccaatggctacaatgtctccagatcaaccacagaggatttcccgctcaggctgctgtcggctgctccctcccagacatctgtgtacttctgtgccagcagtgatggcagtttaggagacgtcgacaccggggagctgttttttggagaaggctctaggctgaccgtactgggtaaggaggcggttggggctccggagagctccgagagggcgggatgggcagaggtggcagtttaggagacctgatggcgcgagggaggc

SEQ ID NO: 3399 - DNA, 495 bp, Artificial Sequence
  source: /note="Description of Artificial Sequence: Synthetic polynucleotide"
gccttgccagcccgctcagtggcagttgtgtctaccttctctgcaggtccagtgaatgctggtgtcactcagaccccaaaattccaggtcctgaagacaggacagagcatgacactgcagtgtgcccaggatatgaaccatgaatacatgtcctggtatcgacaagacccaggcatggggctgaggctgattcattactcagttggtgctggtatcactgaccaaggagaagtccccaatggctacaatgtctccagatcaaccacagaggatttcccgctcaggctgctgtcggctgctccctcccagacatctgtgtacttctgtgccagcagtgatggcagttgtgtctacgtcgacagatacgcagtattttggcccaggcacccggctgacagtgctcggtaagcgggggctcccgctgaagccccggaactggggagggggcgccccgggacgctggcagttgtgtctacctgatggcgcgagggaggc

SEQ ID NO: 3400 - DNA, 495 bp, Artificial Sequence
  source: /note="Description of Artificial Sequence: Synthetic polynucleotide"
gccttgccagcccgctcagtggcagttgtacagtgcttctctgcaggtccagtgaatgctggtgtcactcagaccccaaaattccaggtcctgaagacaggacagagcatgacactgcagtgtgcccaggatatgaaccatgaatacatgtcctggtatcgacaagacccaggcatggggctgaggctgattcattactcagttggtgctggtatcactgaccaaggagaagtccccaatggctacaatgtctccagatcaaccacagaggatttcccgctcaggctgctgtcggctgctccctcccagacatctgtgtacttctgtgccagcagtgatggcagttgtacagtggtcgacaaaacattcagtacttcggcgccgggacccggctctcagtgctgggtaagctggggccgccgggggaccggggacgagactgcgctcgggtttttgtgcgtggcagttgtacagtgctgatggcgcgagggaggc

SEQ ID NO: 3401 - DNA, 495 bp, Artificial Sequence
  source: /note="Description of Artificial Sequence: Synthetic polynucleotide"
gccttgccagcccgctcagtggcagttggatcatccttctctgcaggtccagtgaatgctggtgtcactcagaccccaaaattccaggtcctgaagacaggacagagcatgacactgcagtgtgcccaggatatgaaccatgaatacatgtcctggtatcgacaagacccaggcatggggctgaggctgattcattactcagttggtgctggtatcactgaccaaggagaagtccccaatggctacaatgtctccagatcaaccacagaggatttcccgctcaggctgctgtcggctgctccctcccagacatctgtgtacttctgtgccagcagtgatggcagttggatcatcgtcgacgagacccagtacttcgggccaggcacgcggctcctggtgctcggtgagcgcgggctgctggggcgcgggcgcgggcggcttgggtctggtttttgcggggtggcagttggatcatcctgatggcgcgagggaggc

SEQ ID NO: 3402 - DNA, 495 bp, Artificial Sequence
  source: /note="Description of Artificial Sequence: Synthetic polynucleotide"
gccttgccagcccgctcagtggcagtttattggcgcttctctgcaggtccagtgaatgctggtgtcactcagaccccaaaattccaggtcctgaagacaggacagagcatgacactgcagtgtgcccaggatatgaaccatgaatacatgtcctggtatcgacaagacccaggcatggggctgaggctgattcattactcagttggtgctggtatcactgaccaaggagaagtccccaatggctacaatgtctccagatcaaccacagaggatttcccgctcaggctgctgtcggctgctccctcccagacatctgtgtacttctgtgccagcagtgatggcagtttattggcggtcgacgggccaacgtcctgactttcggggccggcagcaggctgaccgtgctgggtgagttttcgcgggaccacccgggcggcgggattcaggtggaaggcggcggtggcagtttattggcgctgatggcgcgagggaggc

SEQ ID NO: 3403 - DNA, 495 bp, Artificial Sequence
  source: /note="Description of Artificial Sequence: Synthetic polynucleotide"
gccttgccagcccgctcagtggcagttaggcttgacttctctgcaggtccagtgaatgctggtgtcactcagaccccaaaattccaggtcctgaagacaggacagagcatgacactgcagtgtgcccaggatatgaaccatgaatacatgtcctggtatcgacaagacccaggcatggggctgaggctgattcattactcagttggtgctggtatcactgaccaaggagaagtccccaatggctacaatgtctccagatcaaccacagaggatttcccgctcaggctgctgtcggctgctccctcccagacatctgtgtacttctgtgccagcagtgatggcagttaggcttgagtcgacacgagcagtacttcgggccgggcaccaggctcacggtcacaggtgagattcgggcgtctccccaccttccagcccctcggtccccggagtcggagggtggtggcagttaggcttgactgatggcgcgagggaggc

SEQ ID NO: 3404 - DNA, 495 bp, Artificial Sequence
  source: /note="Description of Artificial Sequence: Synthetic polynucleotide"
gccttgccagcccgctcagcagtccaagacactctcttctctgcaggtccagtgaatgctggtgtcactcagaccccaaaattccgcatcctgaagataggacagagcatgacactgcagtgtacccaggatatgaaccataactacatgtactggtatcgacaagacccaggcatggggctgaagctgatttattattcagttggtgctggtatcactgataaaggagaagtcccgaatggctacaacgtctccagatcaaccacagaggatttcccgctcaggctggagttggctgctccctcccagacatctgtgtacttctgtgccagcagtgacagtccaagacactctgtcgacactgaagctttctttggacaaggcaccagactcacagttgtaggtaagacatttttcaggttcttttgcagatccgtcacagggaaaagtgggtccacagcagtccaagacactctctgatggcgcgagggaggc

SEQ ID NO: 3405 - DNA, 495 bp, Artificial Sequence
  source: /note="Description of Artificial Sequence: Synthetic polynucleotide"
gccttgccagcccgctcagcagtccaattcggaaccttctctgcaggtccagtgaatgctggtgtcactcagaccccaaaattccgcatcctgaagataggacagagcatgacactgcagtgtacccaggatatgaaccataactacatgtactggtatcgacaagacccaggcatggggctgaagctgatttattattcagttggtgctggtatcactgataaaggagaagtcccgaatggctacaacgtctccagatcaaccacagaggatttcccgctcaggctggagttggctgctccctcccagacatctgtgtacttctgtgccagcagtgacagtccaattcggaacgtcgactatggctacaccttcggttcggggaccaggttaaccgttgtaggtaaggctgggggtctctaggaggggtgcgatgagggaggactctgtcctgggaaatcagtccaattcggaacctgatggcgcgagggaggc

SEQ ID NO: 3406 - DNA, 495 bp, Artificial Sequence
  source: /note="Description of Artificial Sequence: Synthetic polynucleotide"
gccttgccagcccgctcagcagtccaaaagtaacgcttctctgcaggtccagtgaatgctggtgtcactcagaccccaaaattccgcatcctgaagataggacagagcatgacactgcagtgtacccaggatatgaaccataactacatgtactggtatcgacaagacccaggcatggggctgaagctgatttattattcagttggtgctggtatcactgataaaggagaagtcccgaatggctacaacgtctccagatcaaccacagaggatttcccgctcaggctggagttggctgctccctcccagacatctgtgtacttctgtgccagcagtgacagtccaaaagtaacggtcgacgaaacaccatatattttggagagggaagttggctcactgttgtaggtgagtaagtcaaggctggacagctgggaacttgcaaaaaggggctggaatccagcagtccaaaagtaacgctgatggcgcgagggaggc

SEQ ID NO: 3407 - DNA, 495 bp, Artificial Sequence
  source: /note="Description of Artificial Sequence: Synthetic polynucleotide"
gccttgccagcccgctcagcagtccaagtctcctacttctctgcaggtccagtgaatgctggtgtcactcagaccccaaaattccgcatcctgaagataggacagagcatgacactgcagtgtacccaggatatgaaccataactacatgtactggtatcgacaagacccaggcatggggctgaagctgatttattattcagttggtgctggtatcactgataaaggagaagtcccgaatggctacaacgtctccagatcaaccacagaggatttcccgctcaggctggagttggctgctccctcccagacatctgtgtacttctgtgccagcagtgacagtccaagtctcctagtcgacaatgaaaaactgttttttggcagtggaacccagctctctgtcttgggtatgtaaaagacttctttcgggatagtgtatcataaggtcggagttccaggagcagtccaagtctcctactgatggcgcgagggaggc

SEQ ID NO: 3408 - DNA, 495 bp, Artificial Sequence
  source: /note="Description of Artificial Sequence: Synthetic polynucleotide"
gccttgccagcccgctcagcagtccaaagagtgtccttctctgcaggtccagtgaatgctggtgtcactcagaccccaaaattccgcatcctgaagataggacagagcatgacactgcagtgtacccaggatatgaaccataactacatgtactggtatcgacaagacccaggcatggggctgaagctgatttattattcagttggtgctggtatcactgataaaggagaagtcccgaatggctacaacgtctccagatcaaccacagaggatttcccgctcaggctggagttggctgctccctcccagacatctgtgtacttctgtgccagcagtgacagtccaaagagtgtcgtcgacatcagccccagcattttggtgatgggactcgactctccatcctaggtaagttgcagaatcagggtggtatggccattgtcccttgaaggcagagttctctcagtccaaagagtgtcctgatggcgcgagggaggc

SEQ ID NO: 3409 - DNA, 495 bp, Artificial Sequence
  source: /note="Description of Artificial Sequence: Synthetic polynucleotide"
gccttgccagcccgctcagcagtccaagttccgaacttctctgcaggtccagtgaatgctggtgtcactcagaccccaaaattccgcatcctgaagataggacagagcatgacactgcagtgtacccaggatatgaaccataactacatgtactggtatcgacaagacccaggcatggggctgaagctgatttattattcagttggtgctggtatcactgataaaggagaagtcccgaatggctacaacgtctccagatcaaccacagaggatttcccgctcaggctggagttggctgctccctcccagacatctgtgtacttctgtgccagcagtgacagtccaagttccgaagtcgacataattcacccctccactttgggaacgggaccaggctcactgtgacaggtatgggggctccactcttgactcgggggtgcctgggtttgactgcaatgatcagtccaagttccgaactgatggcgcgagggaggc

SEQ ID NO: 3410 - DNA, 495 bp, Artificial Sequence
  source: /note="Description of Artificial Sequence: Synthetic polynucleotide"
gccttgccagcccgctcagcagtccaacgttacttcttctctgcaggtccagtgaatgctggtgtcactcagaccccaaaattccgcatcctgaagataggacagagcatgacactgcagtgtacccaggatatgaaccataactacatgtactggtatcgacaagacccaggcatggggctgaagctgatttattattcagttggtgctggtatcactgataaaggagaagtcccgaatggctacaacgtctccagatcaaccacagaggatttcccgctcaggctggagttggctgctccctcccagacatctgtgtacttctgtgccagcagtgacagtccaacgttacttgtcgacacaatgagcagttcttcgggccagggacacggctcaccgtgctaggtaagaagggggctccaggtgggagagagggtgagcagcccagcctgcacgaccccagtccaacgttacttctgatggcgcgagggaggc

SEQ ID NO: 3411 - DNA, 495 bp, Artificial Sequence
  source: /note="Description of Artificial Sequence: Synthetic polynucleotide"
gccttgccagcccgctcagcagtccaataggagaccttctctgcaggtccagtgaatgctggtgtcactcagaccccaaaattccgcatcctgaagataggacagagcatgacactgcagtgtacccaggatatgaaccataactacatgtactggtatcgacaagacccaggcatggggctgaagctgatttattattcagttggtgctggtatcactgataaaggagaagtcccgaatggctacaacgtctccagatcaaccacagaggatttcccgctcaggctggagttggctgctccctcccagacatctgtgtacttctgtgccagcagtgacagtccaataggagacgtcgacaccggggagctgttttttggagaaggctctaggctgaccgtactgggtaaggaggcggttggggctccggagagctccgagagggcgggatgggcagaggcagtccaataggagacctgatggcgcgagggaggc

SEQ ID NO: 3412 - DNA, 495 bp, Artificial Sequence
  source: /note="Description of Artificial Sequence: Synthetic polynucleotide"
gccttgccagcccgctcagcagtccaagtgtctaccttctctgcaggtccagtgaatgctggtgtcactcagaccccaaaattccgcatcctgaagataggacagagcatgacactgcagtgtacccaggatatgaaccataactacatgtactggtatcgacaagacccaggcatggggctgaagctgatttattattcagttggtgctggtatcactgataaaggagaagtcccgaatggctacaacgtctccagatcaaccacagaggatttcccgctcaggctggagttggctgctccctcccagacatctgtgtacttctgtgccagcagtgacagtccaagtgtctacgtcgacagatacgcagtattttggcccaggcacccggctgacagtgctcggtaagcgggggctcccgctgaagccccggaactggggagggggcgccccgggacgccagtccaagtgtctacctgatggcgcgagggaggc

SEQ ID NO: 3413 - DNA, 495 bp, Artificial Sequence
  source: /note="Description of Artificial Sequence: Synthetic polynucleotide"
gccttgccagcccgctcagcagtccaagtacagtgcttctctgcaggtccagtgaatgctggtgtcactcagaccccaaaattccgcatcctgaagataggacagagcatgacactgcagtgtacccaggatatgaaccataactacatgtactggtatcgacaagacccaggcatggggctgaagctgatttattattcagttggtgctggtatcactgataaaggagaagtcccgaatggctacaacgtctccagatcaaccacagaggatttcccgctcaggctggagttggctgctccctcccagacatctgtgtacttctgtgccagcagtgacagtccaagtacagtggtcgacaaaacattcagtacttcggcgccgggacccggctctcagtgctgggtaagctggggccgccgggggaccggggacgagactgcgctcgggtttttgtgcgcagtccaagtacagtgctgatggcgcgagggaggc

SEQ ID NO: 3414 - DNA, 495 bp, Artificial Sequence
  source: /note="Description of Artificial Sequence: Synthetic polynucleotide"
gccttgccagcccgctcagcagtccaaggatcatccttctctgcaggtccagtgaatgctggtgtcactcagaccccaaaattccgcatcctgaagataggacagagcatgacactgcagtgtacccaggatatgaaccataactacatgtactggtatcgacaagacccaggcatggggctgaagctgatttattattcagttggtgctggtatcactgataaaggagaagtcccgaatggctacaacgtctccagatcaaccacagaggatttcccgctcaggctggagttggctgctccctcccagacatctgtgtacttctgtgccagcagtgacagtccaaggatcatcgtcgacgagacccagtacttcgggccaggcacgcggctcctggtgctcggtgagcgcgggctgctggggcgcgggcgcgggcggcttgggtctggtttttgcggggcagtccaaggatcatcctgatggcgcgagggaggc

SEQ ID NO: 3415 - DNA, 495 bp, Artificial Sequence
  source: /note="Description of Artificial Sequence: Synthetic polynucleotide"
gccttgccagcccgctcagcagtccaatattggcgcttctctgcaggtccagtgaatgctggtgtcactcagaccccaaaattccgcatcctgaagataggacagagcatgacactgcagtgtacccaggatatgaaccataactacatgtactggtatcgacaagacccaggcatggggctgaagctgatttattattcagttggtgctggtatcactgataaaggagaagtcccgaatggctacaacgtctccagatcaaccacagaggatttcccgctcaggctggagttggctgctccctcccagacatctgtgtacttctgtgccagcagtgacagtccaatattggcggtcgacgggccaacgtcctgactttcggggccggcagcaggctgaccgtgctgggtgagttttcgcgggaccacccgggcggcgggattcaggtggaaggcggcggcagtccaatattggcgctgatggcgcgagggaggc

SEQ ID NO: 3416 - DNA, 495 bp, Artificial Sequence
  source: /note="Description of Artificial Sequence: Synthetic polynucleotide"
gccttgccagcccgctcagcagtccaaaggcttgacttctctgcaggtccagtgaatgctggtgtcactcagaccccaaaattccgcatcctgaagataggacagagcatgacactgcagtgtacccaggatatgaaccataactacatgtactggtatcgacaagacccaggcatggggctgaagctgatttattattcagttggtgctggtatcactgataaaggagaagtcccgaatggctacaacgtctccagatcaaccacagaggatttcccgctcaggctggagttggctgctccctcccagacatctgtgtacttctgtgccagcagtgacagtccaaaggcttgagtcgacacgagcagtacttcgggccgggcaccaggctcacggtcacaggtgagattcgggcgtctccccaccttccagcccctcggtccccggagtcggagggtggcagtccaaaggcttgactgatggcgcgagggaggc

SEQ ID NO: 3417 - DNA, 495 bp, Artificial Sequence
  source: /note="Description of Artificial Sequence: Synthetic polynucleotide"
gccttgccagcccgctcagtacgtacggacactctcttccctgcaggtccaatgaatgctggtgtcactcagaccccaaaattccacgtcctgaagacaggacagagcatgactctgctgtgtgcccaggatatgaaccatgaatacatgtatcggtatcgacaagacccaggcaaggggctgaggctgatttactactcagttgctgctgctctcactgacaaaggagaagttcccaatggctacaatgtctccagatcaaacacagaggatttccccctcaagctggagtcagctgctccctctcagacttctgtttacttctgtgccagcagtgatacgtacggacactctgtcgacactgaagctttctttggacaaggcaccagactcacagttgtaggtaagacatttttcaggttcttttgcagatccgtcacagggaaaagtgggtccacagtacgtacggacactctctgatggcgcgagggaggc

SEQ ID NO: 3418 - DNA, 495 bp, Artificial Sequence
  source: /note="Description of Artificial Sequence: Synthetic polynucleotide"
gccttgccagcccgctcagtacgtacgttcggaaccttccctgcaggtccaatgaatgctggtgtcactcagaccccaaaattccacgtcctgaagacaggacagagcatgactctgctgtgtgcccaggatatgaaccatgaatacatgtatcggtatcgacaagacccaggcaaggggctgaggctgatttactactcagttgctgctgctctcactgacaaaggagaagttcccaatggctacaatgtctccagatcaaacacagaggatttccccctcaagctggagtcagctgctccctctcagacttctgtttacttctgtgccagcagtgatacgtacgttcggaacgtcgactatggctacaccttcggttcggggaccaggttaaccgttgtaggtaaggctgggggtctctaggaggggtgcgatgagggaggactctgtcctgggaaattacgtacgttcggaacctgatggcgcgagggaggc

SEQ ID NO: 3419 - DNA, 495 bp, Artificial Sequence
  source: /note="Description of Artificial Sequence: Synthetic polynucleotide"
gccttgccagcccgctcagtacgtacgaagtaacgcttccctgcaggtccaatgaatgctggtgtcactcagaccccaaaattccacgtcctgaagacaggacagagcatgactctgctgtgtgcccaggatatgaaccatgaatacatgtatcggtatcgacaagacccaggcaaggggctgaggctgatttactactcagttgctgctgctctcactgacaaaggagaagttcccaatggctacaatgtctccagatcaaacacagaggatttccccctcaagctggagtcagctgctccctctcagacttctgtttacttctgtgccagcagtgatacgtacgaagtaacggtcgacgaaacaccatatattttggagagggaagttggctcactgttgtaggtgagtaagtcaaggctggacagctgggaacttgcaaaaaggggctggaatccagtacgtacgaagtaacgctgatggcgcgagggaggc

SEQ ID NO: 3420 - DNA, 495 bp, Artificial Sequence
  source: /note="Description of Artificial Sequence: Synthetic polynucleotide"
gccttgccagcccgctcagtacgtacggtctcctacttccctgcaggtccaatgaatgctggtgtcactcagaccccaaaattccacgtcctgaagacaggacagagcatgactctgctgtgtgcccaggatatgaaccatgaatacatgtatcggtatcgacaagacccaggcaaggggctgaggctgatttactactcagttgctgctgctctcactgacaaaggagaagttcccaatggctacaatgtctccagatcaaacacagaggatttccccctcaagctggagtcagctgctccctctcagacttctgtttacttctgtgccagcagtgatacgtacggtctcctagtcgacaatgaaaaactgttttttggcagtggaacccagctctctgtcttgggtatgtaaaagacttctttcgggatagtgtatcataaggtcggagttccaggagtacgtacggtctcctactgatggcgcgagggaggc

SEQ ID NO: 3421 - DNA, 495 bp, Artificial Sequence
  source: /note="Description of Artificial Sequence: Synthetic polynucleotide"
gccttgccagcccgctcagtacgtacgagagtgtccttccctgcaggtccaatgaatgctggtgtcactcagaccccaaaattccacgtcctgaagacaggacagagcatgactctgctgtgtgcccaggatatgaaccatgaatacatgtatcggtatcgacaagacccaggcaaggggctgaggctgatttactactcagttgctgctgctctcactgacaaaggagaagttcccaatggctacaatgtctccagatcaaacacagaggatttccccctcaagctggagtcagctgctccctctcagacttctgtttacttctgtgccagcagtgatacgtacgagagtgtcgtcgacatcagccccagcattttggtgatgggactcgactctccatcctaggtaagttgcagaatcagggtggtatggccattgtcccttgaaggcagagttctcttacgtacgagagtgtcctgatggcgcgagggaggc

SEQ ID NO: 3422 - DNA, 495 bp, Artificial Sequence
  source: /note="Description of Artificial Sequence: Synthetic polynucleotide"
gccttgccagcccgctcagtacgtacggttccgaacttccctgcaggtccaatgaatgctggtgtcactcagaccccaaaattccacgtcctgaagacaggacagagcatgactctgctgtgtgcccaggatatgaaccatgaatacatgtatcggtatcgacaagacccaggcaaggggctgaggctgatttactactcagttgctgctgctctcactgacaaaggagaagttcccaatggctacaatgtctccagatcaaacacagaggatttccccctcaagctggagtcagctgctccctctcagacttctgtttacttctgtgccagcagtgatacgtacggttccgaagtcgacataattcacccctccactttgggaacgggaccaggctcactgtgacaggtatgggggctccactcttgactcgggggtgcctgggtttgactgcaatgattacgtacggttccgaactgatggcgcgagggaggc

SEQ ID NO: 3423 - DNA, 495 bp, Artificial Sequence
  source: /note="Description of Artificial Sequence: Synthetic polynucleotide"
gccttgccagcccgctcagtacgtacgcgttacttcttccctgcaggtccaatgaatgctggtgtcactcagaccccaaaattccacgtcctgaagacaggacagagcatgactctgctgtgtgcccaggatatgaaccatgaatacatgtatcggtatcgacaagacccaggcaaggggctgaggctgatttactactcagttgctgctgctctcactgacaaaggagaagttcccaatggctacaatgtctccagatcaaacacagaggatttccccctcaagctggagtcagctgctccctctcagacttctgtttacttctgtgccagcagtgatacgtacgcgttacttgtcgacacaatgagcagttcttcgggccagggacacggctcaccgtgctaggtaagaagggggctccaggtgggagagagggtgagcagcccagcctgcacgaccctacgtacgcgttacttctgatggcgcgagggaggc

SEQ ID NO: 3424 - DNA, 495 bp, Artificial Sequence
  source: /note="Description of Artificial Sequence: Synthetic polynucleotide"
gccttgccagcccgctcagtacgtacgtaggagaccttccctgcaggtccaatgaatgctggtgtcactcagaccccaaaattccacgtcctgaagacaggacagagcatgactctgctgtgtgcccaggatatgaaccatgaatacatgtatcggtatcgacaagacccaggcaaggggctgaggctgatttactactcagttgctgctgctctcactgacaaaggagaagttcccaatggctacaatgtctccagatcaaacacagaggatttccccctcaagctggagtcagctgctccctctcagacttctgtttacttctgtgccagcagtgatacgtacgtaggagacgtcgacaccggggagctgttttttggagaaggctctaggctgaccgtactgggtaaggaggcggttggggctccggagagctccgagagggcgggatgggcagaggtacgtacgtaggagacctgatggcgcgagggaggc

SEQ ID NO: 3425 - DNA, 495 bp, Artificial Sequence
  source: /note="Description of Artificial Sequence: Synthetic polynucleotide"
gccttgccagcccgctcagtacgtacggtgtctaccttccctgcaggtccaatgaatgctggtgtcactcagaccccaaaattccacgtcctgaagacaggacagagcatgactctgctgtgtgcccaggatatgaaccatgaatacatgtatcggtatcgacaagacccaggcaaggggctgaggctgatttactactcagttgctgctgctctcactgacaaaggagaagttcccaatggctacaatgtctccagatcaaacacagaggatttccccctcaagctggagtcagctgctccctctcagacttctgtttacttctgtgccagcagtgatacgtacggtgtctacgtcgacagatacgcagtattttggcccaggcacccggctgacagtgctcggtaagcgggggctcccgctgaagccccggaactggggagggggcgccccgggacgctacgtacggtgtctacctgatggcgcgagggaggc

SEQ ID NO: 3426 - DNA, 495 bp, Artificial Sequence
  source: /note="Description of Artificial Sequence: Synthetic polynucleotide"
gccttgccagcccgctcagtacgtacggtacagtgcttccctgcaggtccaatgaatgctggtgtcactcagaccccaaaattccacgtcctgaagacaggacagagcatgactctgctgtgtgcccaggatatgaaccatgaatacatgtatcggtatcgacaagacccaggcaaggggctgaggctgatttactactcagttgctgctgctctcactgacaaaggagaagttcccaatggctacaatgtctccagatcaaacacagaggatttccccctcaagctggagtcagctgctccctctcagacttctgtttacttctgtgccagcagtgatacgtacggtacagtggtcgacaaaacattcagtacttcggcgccgggacccggctctcagtgctgggtaagctggggccgccgggggaccggggacgagactgcgctcgggtttttgtgcgtacgtacggtacagtgctgatggcgcgagggaggc

SEQ ID NO: 3427 - DNA, 495 bp, Artificial Sequence
  source: /note="Description of Artificial Sequence: Synthetic polynucleotide"
gccttgccagcccgctcagtacgtacgggatcatccttccctgcaggtccaatgaatgctggtgtcactcagaccccaaaattccacgtcctgaagacaggacagagcatgactctgctgtgtgcccaggatatgaaccatgaatacatgtatcggtatcgacaagacccaggcaaggggctgaggctgatttactactcagttgctgctgctctcactgacaaaggagaagttcccaatggctacaatgtctccagatcaaacacagaggatttccccctcaagctggagtcagctgctccctctcagacttctgtttacttctgtgccagcagtgatacgtacgggatcatcgtcgacgagacccagtacttcgggccaggcacgcggctcctggtgctcggtgagcgcgggctgctggggcgcgggcgcgggcggcttgggtctggtttttgcggggtacgtacgggatcatcctgatggcgcgagggaggc

SEQ ID NO: 3428 - DNA, 495 bp, Artificial Sequence
  source: /note="Description of Artificial Sequence: Synthetic polynucleotide"
gccttgccagcccgctcagtacgtacgtattggcgcttccctgcaggtccaatgaatgctggtgtcactcagaccccaaaattccacgtcctgaagacaggacagagcatgactctgctgtgtgcccaggatatgaaccatgaatacatgtatcggtatcgacaagacccaggcaaggggctgaggctgatttactactcagttgctgctgctctcactgacaaaggagaagttcccaatggctacaatgtctccagatcaaacacagaggatttccccctcaagctggagtcagctgctccctctcagacttctgtttacttctgtgccagcagtgatacgtacgtattggcggtcgacgggccaacgtcctgactttcggggccggcagcaggctgaccgtgctgggtgagttttcgcgggaccacccgggcggcgggattcaggtggaaggcggcggtacgtacgtattggcgctgatggcgcgagggaggc

SEQ ID NO: 3429 - DNA, 495 bp, Artificial Sequence
  source: /note="Description of Artificial Sequence: Synthetic polynucleotide"
gccttgccagcccgctcagtacgtacgaggcttgacttccctgcaggtccaatgaatgctggtgtcactcagaccccaaaattccacgtcctgaagacaggacagagcatgactctgctgtgtgcccaggatatgaaccatgaatacatgtatcggtatcgacaagacccaggcaaggggctgaggctgatttactactcagttgctgctgctctcactgacaaaggagaagttcccaatggctacaatgtctccagatcaaacacagaggatttccccctcaagctggagtcagctgctccctctcagacttctgtttacttctgtgccagcagtgatacgtacgaggcttgagtcgacacgagcagtacttcgggccgggcaccaggctcacggtcacaggtgagattcgggcgtctccccaccttccagcccctcggtccccggagtcggagggtggtacgtacgaggcttgactgatggcgcgagggaggc

SEQ ID NO: 3430 - DNA, 495 bp, Artificial Sequence
  source: /note="Description of Artificial Sequence: Synthetic polynucleotide"
gccttgccagcccgctcagagtaccgagacactctgttcttctctgcaggtcccgtgaatgctggtgtcactcagaccccaaaattccacatcctgaagacaggacagagcatgacactgcagtgtgcccaggatatgaaccatggatacatgtcctggtatcgacaagacccaggcatggggctgagactgatttactactcagctgctgctggtactactgacaaagaagtccccaatggctacaatgtctctagattaaacacagaggatttcccactcaggctggtgtcggctgctccctcccagacatctgtgtacttgtgtgccagcagtgaagtaccgagacactctgtcgacactgaagctttctttggacaaggcaccagactcacagttgtaggtaagacatttttcaggttcttttgcagatccgtcacagggaaaagtgggtccacagagtaccgagacactctctgatggcgcgagggaggc

SEQ ID NO: 3431 - DNA, 495 bp, Artificial Sequence
  source: /note="Description of Artificial Sequence: Synthetic polynucleotide"
gccttgccagcccgctcagagtaccgattcggaacgttcttctctgcaggtcccgtgaatgctggtgtcactcagaccccaaaattccacatcctgaagacaggacagagcatgacactgcagtgtgcccaggatatgaaccatggatacatgtcctggtatcgacaagacccaggcatggggctgagactgatttactactcagctgctgctggtactactgacaaagaagtccccaatggctacaatgtctctagattaaacacagaggatttcccactcaggctggtgtcggctgctccctcccagacatctgtgtacttgtgtgccagcagtgaagtaccgattcggaacgtcgactatggctacaccttcggttcggggaccaggttaaccgttgtaggtaaggctgggggtctctaggaggggtgcgatgagggaggactctgtcctgggaaatagtaccgattcggaacctgatggcgcgagggaggc

SEQ ID NO: 3432 - DNA, 495 bp, Artificial Sequence
  source: /note="Description of Artificial Sequence: Synthetic polynucleotide"
gccttgccagcccgctcagagtaccgaaagtaacggttcttctctgcaggtcccgtgaatgctggtgtcactcagaccccaaaattccacatcctgaagacaggacagagcatgacactgcagtgtgcccaggatatgaaccatggatacatgtcctggtatcgacaagacccaggcatggggctgagactgatttactactcagctgctgctggtactactgacaaagaagtccccaatggctacaatgtctctagattaaacacagaggatttcccactcaggctggtgtcggctgctccctcccagacatctgtgtacttgtgtgccagcagtgaagtaccgaaagtaacggtcgacgaaacaccatatattttggagagggaagttggctcactgttgtaggtgagtaagtcaaggctggacagctgggaacttgcaaaaaggggctggaatccagagtaccgaaagtaacgctgatggcgcgagggaggc

SEQ ID NO: 3433 - DNA, 495 bp, Artificial Sequence
  source: /note="Description of Artificial Sequence: Synthetic polynucleotide"
gccttgccagcccgctcagagtaccgagtctcctagttcttctctgcaggtcccgtgaatgctggtgtcactcagaccccaaaattccacatcctgaagacaggacagagcatgacactgcagtgtgcccaggatatgaaccatggatacatgtcctggtatcgacaagacccaggcatggggctgagactgatttactactcagctgctgctggtactactgacaaagaagtccccaatggctacaatgtctctagattaaacacagaggatttcccactcaggctggtgtcggctgctccctcccagacatctgtgtacttgtgtgccagcagtgaagtaccgagtctcctagtcgacaatgaaaaactgttttttggcagtggaacccagctctctgtcttgggtatgtaaaagacttctttcgggatagtgtatcataaggtcggagttccaggagagtaccgagtctcctactgatggcgcgagggaggc

SEQ ID NO: 3434 - DNA, 495 bp, Artificial Sequence
  source: /note="Description of Artificial Sequence: Synthetic polynucleotide"
gccttgccagcccgctcagagtaccgaagagtgtcgttcttctctgcaggtcccgtgaatgctggtgtcactcagaccccaaaattccacatcctgaagacaggacagagcatgacactgcagtgtgcccaggatatgaaccatggatacatgtcctggtatcgacaagacccaggcatggggctgagactgatttactactcagctgctgctggtactactgacaaagaagtccccaatggctacaatgtctctagattaaacacagaggatttcccactcaggctggtgtcggctgctccctcccagacatctgtgtacttgtgtgccagcagtgaagtaccgaagagtgtcgtcgacatcagccccagcattttggtgatgggactcgactctccatcctaggtaagttgcagaatcagggtggtatggccattgtcccttgaaggcagagttctctagtaccgaagagtgtcctgatggcgcgagggaggc

SEQ ID NO: 3435 - DNA, 495 bp, Artificial Sequence
  source: /note="Description of Artificial Sequence: Synthetic polynucleotide"
gccttgccagcccgctcagagtaccgagttccgaagttcttctctgcaggtcccgtgaatgctggtgtcactcagaccccaaaattccacatcctgaagacaggacagagcatgacactgcagtgtgcccaggatatgaaccatggatacatgtcctggtatcgacaagacccaggcatggggctgagactgatttactactcagctgctgctggtactactgacaaagaagtccccaatggctacaatgtctctagattaaacacagaggatttcccactcaggctggtgtcggctgctccctcccagacatctgtgtacttgtgtgccagcagtgaagtaccgagttccgaagtcgacataattcacccctccactttgggaacgggaccaggctcactgtgacaggtatgggggctccactcttgactcgggggtgcctgggtttgactgcaatgatagtaccgagttccgaactgatggcgcgagggaggc

SEQ ID NO: 3436 - DNA, 495 bp, Artificial Sequence
  source: /note="Description of Artificial Sequence: Synthetic polynucleotide"
gccttgccagcccgctcagagtaccgacgttacttgttcttctctgcaggtcccgtgaatgctggtgtcactcagaccccaaaattccacatcctgaagacaggacagagcatgacactgcagtgtgcccaggatatgaaccatggatacatgtcctggtatcgacaagacccaggcatggggctgagactgatttactactcagctgctgctggtactactgacaaagaagtccccaatggctacaatgtctctagattaaacacagaggatttcccactcaggctggtgtcggctgctccctcccagacatctgtgtacttgtgtgccagcagtgaagtaccgacgttacttgtcgacacaatgagcagttcttcgggccagggacacggctcaccgtgctaggtaagaagggggctccaggtgggagagagggtgagcagcccagcctgcacgacccagtaccgacgttacttctgatggcgcgagggaggc

SEQ ID NO: 3437 - DNA, 495 bp, Artificial Sequence
  source: /note="Description of Artificial Sequence: Synthetic polynucleotide"
gccttgccagcccgctcagagtaccgataggagacgttcttctctgcaggtcccgtgaatgctggtgtcactcagaccccaaaattccacatcctgaagacaggacagagcatgacactgcagtgtgcccaggatatgaaccatggatacatgtcctggtatcgacaagacccaggcatggggctgagactgatttactactcagctgctgctggtactactgacaaagaagtccccaatggctacaatgtctctagattaaacacagaggatttcccactcaggctggtgtcggctgctccctcccagacatctgtgtacttgtgtgccagcagtgaagtaccgataggagacgtcgacaccggggagctgttttttggagaaggctctaggctgaccgtactgggtaaggaggcggttggggctccggagagctccgagagggcgggatgggcagaggagtaccgataggagacctgatggcgcgagggaggc

SEQ ID NO: 3438 - DNA, 495 bp, Artificial Sequence
  source: /note="Description of Artificial Sequence: Synthetic polynucleotide"
gccttgccagcccgctcagagtaccgagtgtctacgttcttctctgcaggtcccgtgaatgctggtgtcactcagaccccaaaattccacatcctgaagacaggacagagcatgacactgcagtgtgcccaggatatgaaccatggatacatgtcctggtatcgacaagacccaggcatggggctgagactgatttactactcagctgctgctggtactactgacaaagaagtccccaatggctacaatgtctctagattaaacacagaggatttcccactcaggctggtgtcggctgctccctcccagacatctgtgtacttgtgtgccagcagtgaagtaccgagtgtctacgtcgacagatacgcagtattttggcccaggcacccggctgacagtgctcggtaagcgggggctcccgctgaagccccggaactggggagggggcgccccgggacgcagtaccgagtgtctacctgatggcgcgagggaggc

SEQ ID NO: 3439 - DNA, 495 bp, Artificial Sequence
  source: /note="Description of Artificial Sequence: Synthetic polynucleotide"
gccttgccagcccgctcagagtaccgagtacagtggttcttctctgcaggtcccgtgaatgctggtgtcactcagaccccaaaattccacatcctgaagacaggacagagcatgacactgcagtgtgcccaggatatgaaccatggatacatgtcctggtatcgacaagacccaggcatggggctgagactgatttactactcagctgctgctggtactactgacaaagaagtccccaatggctacaatgtctctagattaaacacagaggatttcccactcaggctggtgtcggctgctccctcccagacatctgtgtacttgtgtgccagcagtgaagtaccgagtacagtggtcgacaaaacattcagtacttcggcgccgggacccggctctcagtgctgggtaagctggggccgccgggggaccggggacgagactgcgctcgggtttttgtgcgagtaccgagtacagtgctgatggcgcgagggaggc

SEQ ID NO: 3440 - DNA, 495 bp, Artificial Sequence
  source: /note="Description of Artificial Sequence: Synthetic polynucleotide"
gccttgccagcccgctcagagtaccgaggatcatcgttcttctctgcaggtcccgtgaatgctggtgtcactcagaccccaaaattccacatcctgaagacaggacagagcatgacactgcagtgtgcccaggatatgaaccatggatacatgtcctggtatcgacaagacccaggcatggggctgagactgatttactactcagctgctgctggtactactgacaaagaagtccccaatggctacaatgtctctagattaaacacagaggatttcccactcaggctggtgtcggctgctccctcccagacatctgtgtacttgtgtgccagcagtgaagtaccgaggatcatcgtcgacgagacccagtacttcgggccaggcacgcggctcctggtgctcggtgagcgcgggctgctggggcgcgggcgcgggcggcttgggtctggtttttgcggggagtaccgaggatcatcctgatggcgcgagggaggc

SEQ ID NO: 3441 - DNA, 495 bp, Artificial Sequence
  source: /note="Description of Artificial Sequence: Synthetic polynucleotide"
gccttgccagcccgctcagagtaccgatattggcggttcttctctgcaggtcccgtgaatgctggtgtcactcagaccccaaaattccacatcctgaagacaggacagagcatgacactgcagtgtgcccaggatatgaaccatggatacatgtcctggtatcgacaagacccaggcatggggctgagactgatttactactcagctgctgctggtactactgacaaagaagtccccaatggctacaatgtctctagattaaacacagaggatttcccactcaggctggtgtcggctgctccctcccagacatctgtgtacttgtgtgccagcagtgaagtaccgatattggcggtcgacgggccaacgtcctgactttcggggccggcagcaggctgaccgtgctgggtgagttttcgcgggaccacccgggcggcgggattcaggtggaaggcggcggagtaccgatattggcgctgatggcgcgagggaggc

SEQ ID NO: 3442 - DNA, 495 bp, Artificial Sequence
  source: /note="Description of Artificial Sequence: Synthetic polynucleotide"
gccttgccagcccgctcagagtaccgaaggcttgagttcttctctgcaggtcccgtgaatgctggtgtcactcagaccccaaaattccacatcctgaagacaggacagagcatgacactgcagtgtgcccaggatatgaaccatggatacatgtcctggtatcgacaagacccaggcatggggctgagactgatttactactcagctgctgctggtactactgacaaagaagtccccaatggctacaatgtctctagattaaacacagaggatttcccactcaggctggtgtcggctgctccctcccagacatctgtgtacttgtgtgccagcagtgaagtaccgaaggcttgagtcgacacgagcagtacttcgggccgggcaccaggctcacggtcacaggtgagattcgggcgtctccccaccttccagcccctcggtccccggagtcggagggtggagtaccgaaggcttgactgatggcgcgagggaggc

SEQ ID NO: 3443 - DNA, 495 bp, Artificial Sequence
  source: /note="Description of Artificial Sequence: Synthetic polynucleotide"
gccttgccagcccgctcagatccatgggacactctcttctctgcaggtccagtgaatgctggtgtcactcagaccccaaaattccacatcctgaagacaggacagagcatgacactgcagtgtgcccaggatatgaaccatggatacttgtcctggtatcgacaagacccaggcatggggctgaggcgcattcattactcagttgctgctggtatcactgacaaaggagaagtccccgatggctacaatgtatccagatcaaacacagaggatttcccgctcaggctggagtcagctgctccctcccagacatctgtatacttctgtgccagcagtgaatccatgggacactctgtcgacactgaagctttctttggacaaggcaccagactcacagttgtaggtaagacatttttcaggttcttttgcagatccgtcacagggaaaagtgggtccacagatccatgggacactctctgatggcgcgagggaggc

SEQ ID NO: 3444 - DNA, 495 bp, Artificial Sequence
  source: /note="Description of Artificial Sequence: Synthetic polynucleotide"
gccttgccagcccgctcagatccatggttcggaaccttctctgcaggtccagtgaatgctggtgtcactcagaccccaaaattccacatcctgaagacaggacagagcatgacactgcagtgtgcccaggatatgaaccatggatacttgtcctggtatcgacaagacccaggcatggggctgaggcgcattcattactcagttgctgctggtatcactgacaaaggagaagtccccgatggctacaatgtatccagatcaaacacagaggatttcccgctcaggctggagtcagctgctccctcccagacatctgtatacttctgtgccagcagtgaatccatggttcggaacgtcgactatggctacaccttcggttcggggaccaggttaaccgttgtaggtaaggctgggggtctctaggaggggtgcgatgagggaggactctgtcctgggaaatatccatggttcggaacctgatggcgcgagggaggc

SEQ ID NO: 3445 - DNA, 495 bp, Artificial Sequence
  source: /note="Description of Artificial Sequence: Synthetic polynucleotide"
gccttgccagcccgctcagatccatggaagtaacgcttctctgcaggtccagtgaatgctggtgtcactcagaccccaaaattccacatcctgaagacaggacagagcatgacactgcagtgtgcccaggatatgaaccatggatacttgtcctggtatcgacaagacccaggcatggggctgaggcgcattcattactcagttgctgctggtatcactgacaaaggagaagtccccgatggctacaatgtatccagatcaaacacagaggatttcccgctcaggctggagtcagctgctccctcccagacatctgtatacttctgtgccagcagtgaatccatggaagtaacggtcgacgaaacaccatatattttggagagggaagttggctcactgttgtaggtgagtaagtcaaggctggacagctgggaacttgcaaaaaggggctggaatccagatccatggaagtaacgctgatggcgcgagggaggc

SEQ ID NO: 3446 - DNA, 495 bp, Artificial Sequence
  source: /note="Description of Artificial Sequence: Synthetic polynucleotide"
gccttgccagcccgctcagatccatgggtctcctacttctctgcaggtccagtgaatgctggtgtcactcagaccccaaaattccacatcctgaagacaggacagagcatgacactgcagtgtgcccaggatatgaaccatggatacttgtcctggtatcgacaagacccaggcatggggctgaggcgcattcattactcagttgctgctggtatcactgacaaaggagaagtccccgatggctacaatgtatccagatcaaacacagaggatttcccgctcaggctggagtcagctgctccctcccagacatctgtatacttctgtgccagcagtgaatccatgggtctcctagtcgacaatgaaaaactgttttttggcagtggaacccagctctctgtcttgggtatgtaaaagacttctttcgggatagtgtatcataaggtcggagttccaggagatccatgggtctcctactgatggcgcgagggaggc

SEQ ID NO: 3447 - DNA, 495 bp, Artificial Sequence
  source: /note="Description of Artificial Sequence: Synthetic polynucleotide"
gccttgccagcccgctcagatccatggagagtgtccttctctgcaggtccagtgaatgctggtgtcactcagaccccaaaattccacatcctgaagacaggacagagcatgacactgcagtgtgcccaggatatgaaccatggatacttgtcctggtatcgacaagacccaggcatggggctgaggcgcattcattactcagttgctgctggtatcactgacaaaggagaagtccccgatggctacaatgtatccagatcaaacacagaggatttcccgctcaggctggagtcagctgctccctcccagacatctgtatacttctgtgccagcagtgaatccatggagagtgtcgtcgacatcagccccagcattttggtgatgggactcgactctccatcctaggtaagttgcagaatcagggtggtatggccattgtcccttgaaggcagagttctctatccatggagagtgtcctgatggcgcgagggaggc

SEQ ID NO: 3448 - DNA, 495 bp, Artificial Sequence
  source: /note="Description of Artificial Sequence: Synthetic polynucleotide"
gccttgccagcccgctcagatccatgggttccgaacttctctgcaggtccagtgaatgctggtgtcactcagaccccaaaattccacatcctgaagacaggacagagcatgacactgcagtgtgcccaggatatgaaccatggatacttgtcctggtatcgacaagacccaggcatggggctgaggcgcattcattactcagttgctgctggtatcactgacaaaggagaagtccccgatggctacaatgtatccagatcaaacacagaggatttcccgctcaggctggagtcagctgctccctcccagacatctgtatacttctgtgccagcagtgaatccatgggttccgaagtcgacataattcacccctccactttgggaacgggaccaggctcactgtgacaggtatgggggctccactcttgactcgggggtgcctgggtttgactgcaatgatatccatgggttccgaactgatggcgcgagggaggc

SEQ ID NO: 3449 - DNA, 495 bp, Artificial Sequence
  source: /note="Description of Artificial Sequence: Synthetic polynucleotide"
gccttgccagcccgctcagatccatggcgttacttcttctctgcaggtccagtgaatgctggtgtcactcagaccccaaaattccacatcctgaagacaggacagagcatgacactgcagtgtgcccaggatatgaaccatggatacttgtcctggtatcgacaagacccaggcatggggctgaggcgcattcattactcagttgctgctggtatcactgacaaaggagaagtccccgatggctacaatgtatccagatcaaacacagaggatttcccgctcaggctggagtcagctgctccctcccagacatctgtatacttctgtgccagcagtgaatccatggcgttacttgtcgacacaatgagcagttcttcgggccagggacacggctcaccgtgctaggtaagaagggggctccaggtgggagagagggtgagcagcccagcctgcacgacccatccatggcgttacttctgatggcgcgagggaggc

SEQ ID NO: 3450 - DNA, 495 bp, Artificial Sequence
  source: /note="Description of Artificial Sequence: Synthetic polynucleotide"
gccttgccagcccgctcagatccatggtaggagaccttctctgcaggtccagtgaatgctggtgtcactcagaccccaaaattccacatcctgaagacaggacagagcatgacactgcagtgtgcccaggatatgaaccatggatacttgtcctggtatcgacaagacccaggcatggggctgaggcgcattcattactcagttgctgctggtatcactgacaaaggagaagtccccgatggctacaatgtatccagatcaaacacagaggatttcccgctcaggctggagtcagctgctccctcccagacatctgtatacttctgtgccagcagtgaatccatggtaggagacgtcgacaccggggagctgttttttggagaaggctctaggctgaccgtactgggtaaggaggcggttggggctccggagagctccgagagggcgggatgggcagaggatccatggtaggagacctgatggcgcgagggaggc

SEQ ID NO: 3451 - DNA, 495 bp, Artificial Sequence
  source: /note="Description of Artificial Sequence: Synthetic polynucleotide"
gccttgccagcccgctcagatccatgggtgtctaccttctctgcaggtccagtgaatgctggtgtcactcagaccccaaaattccacatcctgaagacaggacagagcatgacactgcagtgtgcccaggatatgaaccatggatacttgtcctggtatcgacaagacccaggcatggggctgaggcgcattcattactcagttgctgctggtatcactgacaaaggagaagtccccgatggctacaatgtatccagatcaaacacagaggatttcccgctcaggctggagtcagctgctccctcccagacatctgtatacttctgtgccagcagtgaatccatgggtgtctacgtcgacagatacgcagtattttggcccaggcacccggctgacagtgctcggtaagcgggggctcccgctgaagccccggaactggggagggggcgccccgggacgcatccatgggtgtctacctgatggcgcgagggaggc

SEQ ID NO: 3452 - DNA, 495 bp, Artificial Sequence
  source: /note="Description of Artificial Sequence: Synthetic polynucleotide"
gccttgccagcccgctcagatccatgggtacagtgcttctctgcaggtccagtgaatgctggtgtcactcagaccccaaaattccacatcctgaagacaggacagagcatgacactgcagtgtgcccaggatatgaaccatggatacttgtcctggtatcgacaagacccaggcatggggctgaggcgcattcattactcagttgctgctggtatcactgacaaaggagaagtccccgatggctacaatgtatccagatcaaacacagaggatttcccgctcaggctggagtcagctgctccctcccagacatctgtatacttctgtgccagcagtgaatccatgggtacagtggtcgacaaaacattcagtacttcggcgccgggacccggctctcagtgctgggtaagctggggccgccgggggaccggggacgagactgcgctcgggtttttgtgcgatccatgggtacagtgctgatggcgcgagggaggc

SEQ ID NO: 3453 - DNA, 495 bp, Artificial Sequence
  source: /note="Description of Artificial Sequence: Synthetic polynucleotide"
gccttgccagcccgctcagatccatggggatcatccttctctgcaggtccagtgaatgctggtgtcactcagaccccaaaattccacatcctgaagacaggacagagcatgacactgcagtgtgcccaggatatgaaccatggatacttgtcctggtatcgacaagacccaggcatggggctgaggcgcattcattactcagttgctgctggtatcactgacaaaggagaagtccccgatggctacaatgtatccagatcaaacacagaggatttcccgctcaggctggagtcagctgctccctcccagacatctgtatacttctgtgccagcagtgaatccatggggatcatcgtcgacgagacccagtacttcgggccaggcacgcggctcctggtgctcggtgagcgcgggctgctggggcgcgggcgcgggcggcttgggtctggtttttgcggggatccatggggatcatcctgatggcgcgagggaggc

SEQ ID NO: 3454 - DNA, 495 bp, Artificial Sequence
  source: /note="Description of Artificial Sequence: Synthetic polynucleotide"
gccttgccagcccgctcagatccatggtattggcgcttctctgcaggtccagtgaatgctggtgtcactcagaccccaaaattccacatcctgaagacaggacagagcatgacactgcagtgtgcccaggatatgaaccatggatacttgtcctggtatcgacaagacccaggcatggggctgaggcgcattcattactcagttgctgctggtatcactgacaaaggagaagtccccgatggctacaatgtatccagatcaaacacagaggatttcccgctcaggctggagtcagctgctccctcccagacatctgtatacttctgtgccagcagtgaatccatggtattggcggtcgacgggccaacgtcctgactttcggggccggcagcaggctgaccgtgctgggtgagttttcgcgggaccacccgggcggcgggattcaggtggaaggcggcggatccatggtattggcgctgatggcgcgagggaggc

SEQ ID NO: 3455 - DNA, 495 bp, Artificial Sequence
  source: /note="Description of Artificial Sequence: Synthetic polynucleotide"
gccttgccagcccgctcagatccatggaggcttgacttctctgcaggtccagtgaatgctggtgtcactcagaccccaaaattccacatcctgaagacaggacagagcatgacactgcagtgtgcccaggatatgaaccatggatacttgtcctggtatcgacaagacccaggcatggggctgaggcgcattcattactcagttgctgctggtatcactgacaaaggagaagtccccgatggctacaatgtatccagatcaaacacagaggatttcccgctcaggctggagtcagctgctccctcccagacatctgtatacttctgtgccagcagtgaatccatggaggcttgagtcgacacgagcagtacttcgggccgggcaccaggctcacggtcacaggtgagattcgggcgtctccccaccttccagcccctcggtccccggagtcggagggtggatccatggaggcttgactgatggcgcgagggaggc

SEQ ID NO: 3456 - DNA, 495 bp, Artificial Sequence
  source: /note="Description of Artificial Sequence: Synthetic polynucleotide"
gccttgccagcccgctcaggtagcagtgacactctctccacagatcacacaggtgctggagtctcccagtccctgagacacaaggtagcaaagaagggaaaggatgtagctctcagatatgatccaatttcaggtcataatgccctttattggtaccgacagagcctggggcagggcctggagtttccaatttacttccaaggcaaggatgcagcagacaaatcggggcttccccgtgatcggttctctgcacagaggtctgagggatccatctccactctgaagttccagcgcacacagcagggggacttggctgtgtatctctgtgccagcagtgagtagcagtgacactctgtcgacactgaagctttctttggacaaggcaccagactcacagttgtaggtaagacatttttcaggttcttttgcagatccgtcacagggaaaagtgggtccacaggtagcagtgacactctctgatggcgcgagggaggc

SEQ ID NO: 3457 - DNA, 495 bp, Artificial Sequence
  source: /note="Description of Artificial Sequence: Synthetic polynucleotide"
gccttgccagcccgctcaggtagcagtttcggaacctccacagatcacacaggtgctggagtctcccagtccctgagacacaaggtagcaaagaagggaaaggatgtagctctcagatatgatccaatttcaggtcataatgccctttattggtaccgacagagcctggggcagggcctggagtttccaatttacttccaaggcaaggatgcagcagacaaatcggggcttccccgtgatcggttctctgcacagaggtctgagggatccatctccactctgaagttccagcgcacacagcagggggacttggctgtgtatctctgtgccagcagtgagtagcagtttcggaacgtcgactatggctacaccttcggttcggggaccaggttaaccgttgtaggtaaggctgggggtctctaggaggggtgcgatgagggaggactctgtcctgggaaatgtagcagtttcggaacctgatggcgcgagggaggc

SEQ ID NO: 3458 - DNA, 495 bp, Artificial Sequence
  source: /note="Description of Artificial Sequence: Synthetic polynucleotide"
gccttgccagcccgctcaggtagcagtaagtaacgctccacagatcacacaggtgctggagtctcccagtccctgagacacaaggtagcaaagaagggaaaggatgtagctctcagatatgatccaatttcaggtcataatgccctttattggtaccgacagagcctggggcagggcctggagtttccaatttacttccaaggcaaggatgcagcagacaaatcggggcttccccgtgatcggttctctgcacagaggtctgagggatccatctccactctgaagttccagcgcacacagcagggggacttggctgtgtatctctgtgccagcagtgagtagcagtaagtaacggtcgacgaaacaccatatattttggagagggaagttggctcactgttgtaggtgagtaagtcaaggctggacagctgggaacttgcaaaaaggggctggaatccaggtagcagtaagtaacgctgatggcgcgagggaggc

SEQ ID NO: 3459 - DNA, 495 bp, Artificial Sequence
  source: /note="Description of Artificial Sequence: Synthetic polynucleotide"
gccttgccagcccgctcaggtagcagtgtctcctactccacagatcacacaggtgctggagtctcccagtccctgagacacaaggtagcaaagaagggaaaggatgtagctctcagatatgatccaatttcaggtcataatgccctttattggtaccgacagagcctggggcagggcctggagtttccaatttacttccaaggcaaggatgcagcagacaaatcggggcttccccgtgatcggttctctgcacagaggtctgagggatccatctccactctgaagttccagcgcacacagcagggggacttggctgtgtatctctgtgccagcagtgagtagcagtgtctcctagtcgacaatgaaaaactgttttttggcagtggaacccagctctctgtcttgggtatgtaaaagacttctttcgggatagtgtatcataaggtcggagttccaggaggtagcagtgtctcctactgatggcgcgagggaggc

SEQ ID NO: 3460 - DNA, 495 bp, Artificial Sequence
  source: /note="Description of Artificial Sequence: Synthetic polynucleotide"
gccttgccagcccgctcaggtagcagtagagtgtcctccacagatcacacaggtgctggagtctcccagtccctgagacacaaggtagcaaagaagggaaaggatgtagctctcagatatgatccaatttcaggtcataatgccctttattggtaccgacagagcctggggcagggcctggagtttccaatttacttccaaggcaaggatgcagcagacaaatcggggcttccccgtgatcggttctctgcacagaggtctgagggatccatctccactctgaagttccagcgcacacagcagggggacttggctgtgtatctctgtgccagcagtgagtagcagtagagtgtcgtcgacatcagccccagcattttggtgatgggactcgactctccatcctaggtaagttgcagaatcagggtggtatggccattgtcccttgaaggcagagttctctgtagcagtagagtgtcctgatggcgcgagggaggc

SEQ ID NO: 3461 - DNA, 495 bp, Artificial Sequence
  source: /note="Description of Artificial Sequence: Synthetic polynucleotide"
gccttgccagcccgctcaggtagcagtgttccgaactccacagatcacacaggtgctggagtctcccagtccctgagacacaaggtagcaaagaagggaaaggatgtagctctcagatatgatccaatttcaggtcataatgccctttattggtaccgacagagcctggggcagggcctggagtttccaatttacttccaaggcaaggatgcagcagacaaatcggggcttccccgtgatcggttctctgcacagaggtctgagggatccatctccactctgaagttccagcgcacacagcagggggacttggctgtgtatctctgtgccagcagtgagtagcagtgttccgaagtcgacataattcacccctccactttgggaacgggaccaggctcactgtgacaggtatgggggctccactcttgactcgggggtgcctgggtttgactgcaatgatgtagcagtgttccgaactgatggcgcgagggaggc

SEQ ID NO: 3462 - DNA, 495 bp, Artificial Sequence
  source: /note="Description of Artificial Sequence: Synthetic polynucleotide"
gccttgccagcccgctcaggtagcagtcgttacttctccacagatcacacaggtgctggagtctcccagtccctgagacacaaggtagcaaagaagggaaaggatgtagctctcagatatgatccaatttcaggtcataatgccctttattggtaccgacagagcctggggcagggcctggagtttccaatttacttccaaggcaaggatgcagcagacaaatcggggcttccccgtgatcggttctctgcacagaggtctgagggatccatctccactctgaagttccagcgcacacagcagggggacttggctgtgtatctctgtgccagcagtgagtagcagtcgttacttgtcgacacaatgagcagttcttcgggccagggacacggctcaccgtgctaggtaagaagggggctccaggtgggagagagggtgagcagcccagcctgcacgacccgtagcagtcgttacttctgatggcgcgagggaggc

SEQ ID NO: 3463 - DNA, 495 bp, Artificial Sequence
  source: /note="Description of Artificial Sequence: Synthetic polynucleotide"
gccttgccagcccgctcaggtagcagttaggagacctccacagatcacacaggtgctggagtctcccagtccctgagacacaaggtagcaaagaagggaaaggatgtagctctcagatatgatccaatttcaggtcataatgccctttattggtaccgacagagcctggggcagggcctggagtttccaatttacttccaaggcaaggatgcagcagacaaatcggggcttccccgtgatcggttctctgcacagaggtctgagggatccatctccactctgaagttccagcgcacacagcagggggacttggctgtgtatctctgtgccagcagtgagtagcagttaggagacgtcgacaccggggagctgttttttggagaaggctctaggctgaccgtactgggtaaggaggcggttggggctccggagagctccgagagggcgggatgggcagagggtagcagttaggagacctgatggcgcgagggaggc

SEQ ID NO: 3464 - DNA, 495 bp, Artificial Sequence
  source: /note="Description of Artificial Sequence: Synthetic polynucleotide"
gccttgccagcccgctcaggtagcagtgtgtctacctccacagatcacacaggtgctggagtctcccagtccctgagacacaaggtagcaaagaagggaaaggatgtagctctcagatatgatccaatttcaggtcataatgccctttattggtaccgacagagcctggggcagggcctggagtttccaatttacttccaaggcaaggatgcagcagacaaatcggggcttccccgtgatcggttctctgcacagaggtctgagggatccatctccactctgaagttccagcgcacacagcagggggacttggctgtgtatctctgtgccagcagtgagtagcagtgtgtctacgtcgacagatacgcagtattttggcccaggcacccggctgacagtgctcggtaagcgggggctcccgctgaagccccggaactggggagggggcgccccgggacgcgtagcagtgtgtctacctgatggcgcgagggaggc

SEQ ID NO: 3465 - DNA, 495 bp, Artificial Sequence
  source: /note="Description of Artificial Sequence: Synthetic polynucleotide"
gccttgccagcccgctcaggtagcagtgtacagtgctccacagatcacacaggtgctggagtctcccagtccctgagacacaaggtagcaaagaagggaaaggatgtagctctcagatatgatccaatttcaggtcataatgccctttattggtaccgacagagcctggggcagggcctggagtttccaatttacttccaaggcaaggatgcagcagacaaatcggggcttccccgtgatcggttctctgcacagaggtctgagggatccatctccactctgaagttccagcgcacacagcagggggacttggctgtgtatctctgtgccagcagtgagtagcagtgtacagtggtcgacaaaacattcagtacttcggcgccgggacccggctctcagtgctgggtaagctggggccgccgggggaccggggacgagactgcgctcgggtttttgtgcggtagcagtgtacagtgctgatggcgcgagggaggc

SEQ ID NO: 3466 - DNA, 495 bp, Artificial Sequence
  source: /note="Description of Artificial Sequence: Synthetic polynucleotide"
gccttgccagcccgctcaggtagcagtggatcatcctccacagatcacacaggtgctggagtctcccagtccctgagacacaaggtagcaaagaagggaaaggatgtagctctcagatatgatccaatttcaggtcataatgccctttattggtaccgacagagcctggggcagggcctggagtttccaatttacttccaaggcaaggatgcagcagacaaatcggggcttccccgtgatcggttctctgcacagaggtctgagggatccatctccactctgaagttccagcgcacacagcagggggacttggctgtgtatctctgtgccagcagtgagtagcagtggatcatcgtcgacgagacccagtacttcgggccaggcacgcggctcctggtgctcggtgagcgcgggctgctggggcgcgggcgcgggcggcttgggtctggtttttgcgggggtagcagtggatcatcctgatggcgcgagggaggc

SEQ ID NO: 3467 - DNA, 495 bp, Artificial Sequence
  source: /note="Description of Artificial Sequence: Synthetic polynucleotide"
gccttgccagcccgctcaggtagcagttattggcgctccacagatcacacaggtgctggagtctcccagtccctgagacacaaggtagcaaagaagggaaaggatgtagctctcagatatgatccaatttcaggtcataatgccctttattggtaccgacagagcctggggcagggcctggagtttccaatttacttccaaggcaaggatgcagcagacaaatcggggcttccccgtgatcggttctctgcacagaggtctgagggatccatctccactctgaagttccagcgcacacagcagggggacttggctgtgtatctctgtgccagcagtgagtagcagttattggcggtcgacgggccaacgtcctgactttcggggccggcagcaggctgaccgtgctgggtgagttttcgcgggaccacccgggcggcgggattcaggtggaaggcggcgggtagcagttattggcgctgatggcgcgagggaggc

SEQ ID NO: 3468 - DNA, 495 bp, Artificial Sequence
  source: /note="Description of Artificial Sequence: Synthetic polynucleotide"
gccttgccagcccgctcaggtagcagtaggcttgactccacagatcacacaggtgctggagtctcccagtccctgagacacaaggtagcaaagaagggaaaggatgtagctctcagatatgatccaatttcaggtcataatgccctttattggtaccgacagagcctggggcagggcctggagtttccaatttacttccaaggcaaggatgcagcagacaaatcggggcttccccgtgatcggttctctgcacagaggtctgagggatccatctccactctgaagttccagcgcacacagcagggggacttggctgtgtatctctgtgccagcagtgagtagcagtaggcttgagtcgacacgagcagtacttcgggccgggcaccaggctcacggtcacaggtgagattcgggcgtctccccaccttccagcccctcggtccccggagtcggagggtgggtagcagtaggcttgactgatggcgcgagggaggc

SEQ ID NO: 3469 - DNA, 495 bp, Artificial Sequence
  source: /note="Description of Artificial Sequence: Synthetic polynucleotide"
gccttgccagcccgctcagatcttcgtgacactctctccacagatcacacaggagctggagtctcccagtcccccagtaacaaggtcacagagaagggaaaggatgtagagctcaggtgtgatccaatttcaggtcatactgccctttactggtaccgacagagcctggggcagggcctggagtttttaatttacttccaaggcaacagtgcaccagacaaatcagggctgcccagtgatcgcttctctgcagagaggactgggggatccgtctccactctgacgatccagcgcacacagcaggaggactcggccgtgtatctctgtgccagcagtgaatcttcgtgacactctgtcgacactgaagctttctttggacaaggcaccagactcacagttgtaggtaagacatttttcaggttcttttgcagatccgtcacagggaaaagtgggtccacagatcttcgtgacactctctgatggcgcgagggaggc

SEQ ID NO: 3470 - DNA, 495 bp, Artificial Sequence
  source: /note="Description of Artificial Sequence: Synthetic polynucleotide"
gccttgccagcccgctcagatcttcgtttcggaacctccacagatcacacaggagctggagtctcccagtcccccagtaacaaggtcacagagaagggaaaggatgtagagctcaggtgtgatccaatttcaggtcatactgccctttactggtaccgacagagcctggggcagggcctggagtttttaatttacttccaaggcaacagtgcaccagacaaatcagggctgcccagtgatcgcttctctgcagagaggactgggggatccgtctccactctgacgatccagcgcacacagcaggaggactcggccgtgtatctctgtgccagcagtgaatcttcgtttcggaacgtcgactatggctacaccttcggttcggggaccaggttaaccgttgtaggtaaggctgggggtctctaggaggggtgcgatgagggaggactctgtcctgggaaatatcttcgtttcggaacctgatggcgcgagggaggc

SEQ ID NO: 3471 - DNA, 495 bp, Artificial Sequence
  source: /note="Description of Artificial Sequence: Synthetic polynucleotide"
gccttgccagcccgctcagatcttcgtaagtaacgctccacagatcacacaggagctggagtctcccagtcccccagtaacaaggtcacagagaagggaaaggatgtagagctcaggtgtgatccaatttcaggtcatactgccctttactggtaccgacagagcctggggcagggcctggagtttttaatttacttccaaggcaacagtgcaccagacaaatcagggctgcccagtgatcgcttctctgcagagaggactgggggatccgtctccactctgacgatccagcgcacacagcaggaggactcggccgtgtatctctgtgccagcagtgaatcttcgtaagtaacggtcgacgaaacaccatatattttggagagggaagttggctcactgttgtaggtgagtaagtcaaggctggacagctgggaacttgcaaaaaggggctggaatccagatcttcgtaagtaacgctgatggcgcgagggaggc

SEQ ID NO: 3472 - DNA, 495 bp, Artificial Sequence
  source: /note="Description of Artificial Sequence: Synthetic polynucleotide"
gccttgccagcccgctcagatcttcgtgtctcctactccacagatcacacaggagctggagtctcccagtcccccagtaacaaggtcacagagaagggaaaggatgtagagctcaggtgtgatccaatttcaggtcatactgccctttactggtaccgacagagcctggggcagggcctggagtttttaatttacttccaaggcaacagtgcaccagacaaatcagggctgcccagtgatcgcttctctgcagagaggactgggggatccgtctccactctgacgatccagcgcacacagcaggaggactcggccgtgtatctctgtgccagcagtgaatcttcgtgtctcctagtcgacaatgaaaaactgttttttggcagtggaacccagctctctgtcttgggtatgtaaaagacttctttcgggatagtgtatcataaggtcggagttccaggagatcttcgtgtctcctactgatggcgcgagggaggc

SEQ ID NO: 3473 - DNA, 495 bp, Artificial Sequence
  source: /note="Description of Artificial Sequence: Synthetic polynucleotide"
gccttgccagcccgctcagatcttcgtagagtgtcctccacagatcacacaggagctggagtctcccagtcccccagtaacaaggtcacagagaagggaaaggatgtagagctcaggtgtgatccaatttcaggtcatactgccctttactggtaccgacagagcctggggcagggcctggagtttttaatttacttccaaggcaacagtgcaccagacaaatcagggctgcccagtgatcgcttctctgcagagaggactgggggatccgtctccactctgacgatccagcgcacacagcaggaggactcggccgtgtatctctgtgccagcagtgaatcttcgtagagtgtcgtcgacatcagccccagcattttggtgatgggactcgactctccatcctaggtaagttgcagaatcagggtggtatggccattgtcccttgaaggcagagttctctatcttcgtagagtgtcctgatggcgcgagggaggc

SEQ ID NO: 3474 - DNA, 495 bp, Artificial Sequence
  source: /note="Description of Artificial Sequence: Synthetic polynucleotide"
gccttgccagcccgctcagatcttcgtgttccgaactccacagatcacacaggagctggagtctcccagtcccccagtaacaaggtcacagagaagggaaaggatgtagagctcaggtgtgatccaatttcaggtcatactgccctttactggtaccgacagagcctggggcagggcctggagtttttaatttacttccaaggcaacagtgcaccagacaaatcagggctgcccagtgatcgcttctctgcagagaggactgggggatccgtctccactctgacgatccagcgcacacagcaggaggactcggccgtgtatctctgtgccagcagtgaatcttcgtgttccgaagtcgacataattcacccctccactttgggaacgggaccaggctcactgtgacaggtatgggggctccactcttgactcgggggtgcctgggtttgactgcaatgatatcttcgtgttccgaactgatggcgcgagggaggc

SEQ ID NO: 3475 - DNA, 495 bp, Artificial Sequence
  source: /note="Description of Artificial Sequence: Synthetic polynucleotide"
gccttgccagcccgctcagatcttcgtcgttacttctccacagatcacacaggagctggagtctcccagtcccccagtaacaaggtcacagagaagggaaaggatgtagagctcaggtgtgatccaatttcaggtcatactgccctttactggtaccgacagagcctggggcagggcctggagtttttaatttacttccaaggcaacagtgcaccagacaaatcagggctgcccagtgatcgcttctctgcagagaggactgggggatccgtctccactctgacgatccagcgcacacagcaggaggactcggccgtgtatctctgtgccagcagtgaatcttcgtcgttacttgtcgacacaatgagcagttcttcgggccagggacacggctcaccgtgctaggtaagaagggggctccaggtgggagagagggtgagcagcccagcctgcacgacccatcttcgtcgttacttctgatggcgcgagggaggc

SEQ ID NO: 3476 - DNA, 495 bp, Artificial Sequence
  source: /note="Description of Artificial Sequence: Synthetic polynucleotide"
gccttgccagcccgctcagatcttcgttaggagacctccacagatcacacaggagctggagtctcccagtcccccagtaacaaggtcacagagaagggaaaggatgtagagctcaggtgtgatccaatttcaggtcatactgccctttactggtaccgacagagcctggggcagggcctggagtttttaatttacttccaaggcaacagtgcaccagacaaatcagggctgcccagtgatcgcttctctgcagagaggactgggggatccgtctccactctgacgatccagcgcacacagcaggaggactcggccgtgtatctctgtgccagcagtgaatcttcgttaggagacgtcgacaccggggagctgttttttggagaaggctctaggctgaccgtactgggtaaggaggcggttggggctccggagagctccgagagggcgggatgggcagaggatcttcgttaggagacctgatggcgcgagggaggc

SEQ ID NO: 3477 - DNA, 495 bp, Artificial Sequence
  source: /note="Description of Artificial Sequence: Synthetic polynucleotide"
gccttgccagcccgctcagatcttcgtgtgtctacctccacagatcacacaggagctggagtctcccagtcccccagtaacaaggtcacagagaagggaaaggatgtagagctcaggtgtgatccaatttcaggtcatactgccctttactggtaccgacagagcctggggcagggcctggagtttttaatttacttccaaggcaacagtgcaccagacaaatcagggctgcccagtgatcgcttctctgcagagaggactgggggatccgtctccactctgacgatccagcgcacacagcaggaggactcggccgtgtatctctgtgccagcagtgaatcttcgtgtgtctacgtcgacagatacgcagtattttggcccaggcacccggctgacagtgctcggtaagcgggggctcccgctgaagccccggaactggggagggggcgccccgggacgcatcttcgtgtgtctacctgatggcgcgagggaggc

SEQ ID NO: 3478 - DNA, 495 bp, Artificial Sequence
  source: /note="Description of Artificial Sequence: Synthetic polynucleotide"
gccttgccagcccgctcagatcttcgtgtacagtgctccacagatcacacaggagctggagtctcccagtcccccagtaacaaggtcacagagaagggaaaggatgtagagctcaggtgtgatccaatttcaggtcatactgccctttactggtaccgacagagcctggggcagggcctggagtttttaatttacttccaaggcaacagtgcaccagacaaatcagggctgcccagtgatcgcttctctgcagagaggactgggggatccgtctccactctgacgatccagcgcacacagcaggaggactcggccgtgtatctctgtgccagcagtgaatcttcgtgtacagtggtcgacaaaacattcagtacttcggcgccgggacccggctctcagtgctgggtaagctggggccgccgggggaccggggacgagactgcgctcgggtttttgtgcgatcttcgtgtacagtgctgatggcgcgagggaggc

SEQ ID NO: 3479 - DNA, 495 bp, Artificial Sequence
  source: /note="Description of Artificial Sequence: Synthetic polynucleotide"
gccttgccagcccgctcagatcttcgtggatcatcctccacagatcacacaggagctggagtctcccagtcccccagtaacaaggtcacagagaagggaaaggatgtagagctcaggtgtgatccaatttcaggtcatactgccctttactggtaccgacagagcctggggcagggcctggagtttttaatttacttccaaggcaacagtgcaccagacaaatcagggctgcccagtgatcgcttctctgcagagaggactgggggatccgtctccactctgacgatccagcgcacacagcaggaggactcggccgtgtatctctgtgccagcagtgaatcttcgtggatcatcgtcgacgagacccagtacttcgggccaggcacgcggctcctggtgctcggtgagcgcgggctgctggggcgcgggcgcgggcggcttgggtctggtttttgcggggatcttcgtggatcatcctgatggcgcgagggaggc

SEQ ID NO: 3480 - DNA, 495 bp, Artificial Sequence
  source: /note="Description of Artificial Sequence: Synthetic polynucleotide"
gccttgccagcccgctcagatcttcgttattggcgctccacagatcacacaggagctggagtctcccagtcccccagtaacaaggtcacagagaagggaaaggatgtagagctcaggtgtgatccaatttcaggtcatactgccctttactggtaccgacagagcctggggcagggcctggagtttttaatttacttccaaggcaacagtgcaccagacaaatcagggctgcccagtgatcgcttctctgcagagaggactgggggatccgtctccactctgacgatccagcgcacacagcaggaggactcggccgtgtatctctgtgccagcagtgaatcttcgttattggcggtcgacgggccaacgtcctgactttcggggccggcagcaggctgaccgtgctgggtgagttttcgcgggaccacccgggcggcgggattcaggtggaaggcggcggatcttcgttattggcgctgatggcgcgagggaggc

SEQ ID NO: 3481 - DNA, 495 bp, Artificial Sequence
  source: /note="Description of Artificial Sequence: Synthetic polynucleotide"
gccttgccagcccgctcagatcttcgtaggcttgactccacagatcacacaggagctggagtctcccagtcccccagtaacaaggtcacagagaagggaaaggatgtagagctcaggtgtgatccaatttcaggtcatactgccctttactggtaccgacagagcctggggcagggcctggagtttttaatttacttccaaggcaacagtgcaccagacaaatcagggctgcccagtgatcgcttctctgcagagaggactgggggatccgtctccactctgacgatccagcgcacacagcaggaggactcggccgtgtatctctgtgccagcagtgaatcttcgtaggcttgagtcgacacgagcagtacttcgggccgggcaccaggctcacggtcacaggtgagattcgggcgtctccccaccttccagcccctcggtccccggagtcggagggtggatcttcgtaggcttgactgatggcgcgagggaggc

SEQ ID NO: 3482 - DNA, 495 bp, Artificial Sequence
  source: /note="Description of Artificial Sequence: Synthetic polynucleotide"
gccttgccagcccgctcagtccacagtgacactctctccgcagatcacacaggtgctggagtctcccagacccccagtaacaaggtcacagagaagggaaaatatgtagagctcaggtgtgatccaatttcaggtcatactgccctttactggtaccgacaaagcctggggcagggcccagagtttctaatttacttccaaggcacgggtgcggcagatgactcagggctgcccaacgatcggttctttgcagtcaggcctgagggatccgtctctactctgaagatccagcgcacagagcggggggactcagccgtgtatctctgtgccagcagtgatccacagtgacactctgtcgacactgaagctttctttggacaaggcaccagactcacagttgtaggtaagacatttttcaggttcttttgcagatccgtcacagggaaaagtgggtccacagtccacagtgacactctctgatggcgcgagggaggc

SEQ ID NO: 3483 - DNA, 495 bp, Artificial Sequence
  source: /note="Description of Artificial Sequence: Synthetic polynucleotide"
gccttgccagcccgctcagtccacagtttcggaacctccgcagatcacacaggtgctggagtctcccagacccccagtaacaaggtcacagagaagggaaaatatgtagagctcaggtgtgatccaatttcaggtcatactgccctttactggtaccgacaaagcctggggcagggcccagagtttctaatttacttccaaggcacgggtgcggcagatgactcagggctgcccaacgatcggttctttgcagtcaggcctgagggatccgtctctactctgaagatccagcgcacagagcggggggactcagccgtgtatctctgtgccagcagtgatccacagtttcggaacgtcgactatggctacaccttcggttcggggaccaggttaaccgttgtaggtaaggctgggggtctctaggaggggtgcgatgagggaggactctgtcctgggaaattccacagtttcggaacctgatggcgcgagggaggc

SEQ ID NO: 3484 - DNA, 495 bp, Artificial Sequence
  source: /note="Description of Artificial Sequence: Synthetic polynucleotide"
gccttgccagcccgctcagtccacagtaagtaacgctccgcagatcacacaggtgctggagtctcccagacccccagtaacaaggtcacagagaagggaaaatatgtagagctcaggtgtgatccaatttcaggtcatactgccctttactggtaccgacaaagcctggggcagggcccagagtttctaatttacttccaaggcacgggtgcggcagatgactcagggctgcccaacgatcggttctttgcagtcaggcctgagggatccgtctctactctgaagatccagcgcacagagcggggggactcagccgtgtatctctgtgccagcagtgatccacagtaagtaacggtcgacgaaacaccatatattttggagagggaagttggctcactgttgtaggtgagtaagtcaaggctggacagctgggaacttgcaaaaaggggctggaatccagtccacagtaagtaacgctgatggcgcgagggaggc

SEQ ID NO: 3485 - DNA, 495 bp, Artificial Sequence
  source: /note="Description of Artificial Sequence: Synthetic polynucleotide"
gccttgccagcccgctcagtccacagtgtctcctactccgcagatcacacaggtgctggagtctcccagacccccagtaacaaggtcacagagaagggaaaatatgtagagctcaggtgtgatccaatttcaggtcatactgccctttactggtaccgacaaagcctggggcagggcccagagtttctaatttacttccaaggcacgggtgcggcagatgactcagggctgcccaacgatcggttctttgcagtcaggcctgagggatccgtctctactctgaagatccagcgcacagagcggggggactcagccgtgtatctctgtgccagcagtgatccacagtgtctcctagtcgacaatgaaaaactgttttttggcagtggaacccagctctctgtcttgggtatgtaaaagacttctttcgggatagtgtatcataaggtcggagttccaggagtccacagtgtctcctactgatggcgcgagggaggc

SEQ ID NO: 3486 - DNA, 495 bp, Artificial Sequence
  source: /note="Description of Artificial Sequence: Synthetic polynucleotide"
gccttgccagcccgctcagtccacagtagagtgtcctccgcagatcacacaggtgctggagtctcccagacccccagtaacaaggtcacagagaagggaaaatatgtagagctcaggtgtgatccaatttcaggtcatactgccctttactggtaccgacaaagcctggggcagggcccagagtttctaatttacttccaaggcacgggtgcggcagatgactcagggctgcccaacgatcggttctttgcagtcaggcctgagggatccgtctctactctgaagatccagcgcacagagcggggggactcagccgtgtatctctgtgccagcagtgatccacagtagagtgtcgtcgacatcagccccagcattttggtgatgggactcgactctccatcctaggtaagttgcagaatcagggtggtatggccattgtcccttgaaggcagagttctcttccacagtagagtgtcctgatggcgcgagggaggc

SEQ ID NO: 3487 - DNA, 495 bp, Artificial Sequence
  source: /note="Description of Artificial Sequence: Synthetic polynucleotide"
gccttgccagcccgctcagtccacagtgttccgaactccgcagatcacacaggtgctggagtctcccagacccccagtaacaaggtcacagagaagggaaaatatgtagagctcaggtgtgatccaatttcaggtcatactgccctttactggtaccgacaaagcctggggcagggcccagagtttctaatttacttccaaggcacgggtgcggcagatgactcagggctgcccaacgatcggttctttgcagtcaggcctgagggatccgtctctactctgaagatccagcgcacagagcggggggactcagccgtgtatctctgtgccagcagtgatccacagtgttccgaagtcgacataattcacccctccactttgggaacgggaccaggctcactgtgacaggtatgggggctccactcttgactcgggggtgcctgggtttgactgcaatgattccacagtgttccgaactgatggcgcgagggaggc

SEQ ID NO: 3488 - DNA, 495 bp, Artificial Sequence
  source: /note="Description of Artificial Sequence: Synthetic polynucleotide"
gccttgccagcccgctcagtccacagtcgttacttctccgcagatcacacaggtgctggagtctcccagacccccagtaacaaggtcacagagaagggaaaatatgtagagctcaggtgtgatccaatttcaggtcatactgccctttactggtaccgacaaagcctggggcagggcccagagtttctaatttacttccaaggcacgggtgcggcagatgactcagggctgcccaacgatcggttctttgcagtcaggcctgagggatccgtctctactctgaagatccagcgcacagagcggggggactcagccgtgtatctctgtgccagcagtgatccacagtcgttacttgtcgacacaatgagcagttcttcgggccagggacacggctcaccgtgctaggtaagaagggggctccaggtgggagagagggtgagcagcccagcctgcacgaccctccacagtcgttacttctgatggcgcgagggaggc

SEQ ID NO: 3489 - DNA, 495 bp, Artificial Sequence
  source: /note="Description of Artificial Sequence: Synthetic polynucleotide"
gccttgccagcccgctcagtccacagttaggagacctccgcagatcacacaggtgctggagtctcccagacccccagtaacaaggtcacagagaagggaaaatatgtagagctcaggtgtgatccaatttcaggtcatactgccctttactggtaccgacaaagcctggggcagggcccagagtttctaatttacttccaaggcacgggtgcggcagatgactcagggctgcccaacgatcggttctttgcagtcaggcctgagggatccgtctctactctgaagatccagcgcacagagcggggggactcagccgtgtatctctgtgccagcagtgatccacagttaggagacgtcgacaccggggagctgttttttggagaaggctctaggctgaccgtactgggtaaggaggcggttggggctccggagagctccgagagggcgggatgggcagaggtccacagttaggagacctgatggcgcgagggaggc

SEQ ID NO: 3490 - DNA, 495 bp, Artificial Sequence
  source: /note="Description of Artificial Sequence: Synthetic polynucleotide"
gccttgccagcccgctcagtccacagtgtgtctacctccgcagatcacacaggtgctggagtctcccagacccccagtaacaaggtcacagagaagggaaaatatgtagagctcaggtgtgatccaatttcaggtcatactgccctttactggtaccgacaaagcctggggcagggcccagagtttctaatttacttccaaggcacgggtgcggcagatgactcagggctgcccaacgatcggttctttgcagtcaggcctgagggatccgtctctactctgaagatccagcgcacagagcggggggactcagccgtgtatctctgtgccagcagtgatccacagtgtgtctacgtcgacagatacgcagtattttggcccaggcacccggctgacagtgctcggtaagcgggggctcccgctgaagccccggaactggggagggggcgccccgggacgctccacagtgtgtctacctgatggcgcgagggaggc

SEQ ID NO: 3491 - DNA, 495 bp, Artificial Sequence
  source: /note="Description of Artificial Sequence: Synthetic polynucleotide"
gccttgccagcccgctcagtccacagtgtacagtgctccgcagatcacacaggtgctggagtctcccagacccccagtaacaaggtcacagagaagggaaaatatgtagagctcaggtgtgatccaatttcaggtcatactgccctttactggtaccgacaaagcctggggcagggcccagagtttctaatttacttccaaggcacgggtgcggcagatgactcagggctgcccaacgatcggttctttgcagtcaggcctgagggatccgtctctactctgaagatccagcgcacagagcggggggactcagccgtgtatctctgtgccagcagtgatccacagtgtacagtggtcgacaaaacattcagtacttcggcgccgggacccggctctcagtgctgggtaagctggggccgccgggggaccggggacgagactgcgctcgggtttttgtgcgtccacagtgtacagtgctgatggcgcgagggaggc

SEQ ID NO: 3492 - DNA, 495 bp, Artificial Sequence
  source: /note="Description of Artificial Sequence: Synthetic polynucleotide"
gccttgccagcccgctcagtccacagtggatcatcctccgcagatcacacaggtgctggagtctcccagacccccagtaacaaggtcacagagaagggaaaatatgtagagctcaggtgtgatccaatttcaggtcatactgccctttactggtaccgacaaagcctggggcagggcccagagtttctaatttacttccaaggcacgggtgcggcagatgactcagggctgcccaacgatcggttctttgcagtcaggcctgagggatccgtctctactctgaagatccagcgcacagagcggggggactcagccgtgtatctctgtgccagcagtgatccacagtggatcatcgtcgacgagacccagtacttcgggccaggcacgcggctcctggtgctcggtgagcgcgggctgctggggcgcgggcgcgggcggcttgggtctggtttttgcggggtccacagtggatcatcctgatggcgcgagggaggc

SEQ ID NO: 3493 - DNA, 495 bp, Artificial Sequence
  source: /note="Description of Artificial Sequence: Synthetic polynucleotide"
gccttgccagcccgctcagtccacagttattggcgctccgcagatcacacaggtgctggagtctcccagacccccagtaacaaggtcacagagaagggaaaatatgtagagctcaggtgtgatccaatttcaggtcatactgccctttactggtaccgacaaagcctggggcagggcccagagtttctaatttacttccaaggcacgggtgcggcagatgactcagggctgcccaacgatcggttctttgcagtcaggcctgagggatccgtctctactctgaagatccagcgcacagagcggggggactcagccgtgtatctctgtgccagcagtgatccacagttattggcggtcgacgggccaacgtcctgactttcggggccggcagcaggctgaccgtgctgggtgagttttcgcgggaccacccgggcggcgggattcaggtggaaggcggcggtccacagttattggcgctgatggcgcgagggaggc

SEQ ID NO: 3494 - DNA, 495 bp, Artificial Sequence
  source: /note="Description of Artificial Sequence: Synthetic polynucleotide"
gccttgccagcccgctcagtccacagtaggcttgactccgcagatcacacaggtgctggagtctcccagacccccagtaacaaggtcacagagaagggaaaatatgtagagctcaggtgtgatccaatttcaggtcatactgccctttactggtaccgacaaagcctggggcagggcccagagtttctaatttacttccaaggcacgggtgcggcagatgactcagggctgcccaacgatcggttctttgcagtcaggcctgagggatccgtctctactctgaagatccagcgcacagagcggggggactcagccgtgtatctctgtgccagcagtgatccacagtaggcttgagtcgacacgagcagtacttcgggccgggcaccaggctcacggtcacaggtgagattcgggcgtctccccaccttccagcccctcggtccccggagtcggagggtggtccacagtaggcttgactgatggcgcgagggaggc

SEQ ID NO: 3495 - DNA, 495 bp, Artificial Sequence
  source: /note="Description of Artificial Sequence: Synthetic polynucleotide"
gccttgccagcccgctcagatgacaccgacactctttccacagatcacacaggtgctggagtctcccagtccccaaggtacaaagtcgcaaagaggggacgggatgtagctctcaggtgtgattcaatttcgggtcatgtaaccctttattggtaccgacagaccctggggcagggctcagaggttctgacttactcccagagtgatgctcaacgagacaaatcagggcggcccagtggtcggttctctgcagagaggcctgagagatccgtctccactctgaagatccagcgcacagagcagggggactcagctgtgtatctctgtgccagcagtgaatgacaccgacactctgtcgacactgaagctttctttggacaaggcaccagactcacagttgtaggtaagacatttttcaggttcttttgcagatccgtcacagggaaaagtgggtccacagatgacaccgacactctctgatggcgcgagggaggc

SEQ ID NO: 3496 - DNA, 495 bp, Artificial Sequence
  source: /note="Description of Artificial Sequence: Synthetic polynucleotide"
gccttgccagcccgctcagatgacaccttcggaacttccacagatcacacaggtgctggagtctcccagtccccaaggtacaaagtcgcaaagaggggacgggatgtagctctcaggtgtgattcaatttcgggtcatgtaaccctttattggtaccgacagaccctggggcagggctcagaggttctgacttactcccagagtgatgctcaacgagacaaatcagggcggcccagtggtcggttctctgcagagaggcctgagagatccgtctccactctgaagatccagcgcacagagcagggggactcagctgtgtatctctgtgccagcagtgaatgacaccttcggaacgtcgactatggctacaccttcggttcggggaccaggttaaccgttgtaggtaaggctgggggtctctaggaggggtgcgatgagggaggactctgtcctgggaaatatgacaccttcggaacctgatggcgcgagggaggc

SEQ ID NO: 3497 - DNA, 495 bp, Artificial Sequence
  source: /note="Description of Artificial Sequence: Synthetic polynucleotide"
gccttgccagcccgctcagatgacaccaagtaacgttccacagatcacacaggtgctggagtctcccagtccccaaggtacaaagtcgcaaagaggggacgggatgtagctctcaggtgtgattcaatttcgggtcatgtaaccctttattggtaccgacagaccctggggcagggctcagaggttctgacttactcccagagtgatgctcaacgagacaaatcagggcggcccagtggtcggttctctgcagagaggcctgagagatccgtctccactctgaagatccagcgcacagagcagggggactcagctgtgtatctctgtgccagcagtgaatgacaccaagtaacggtcgacgaaacaccatatattttggagagggaagttggctcactgttgtaggtgagtaagtcaaggctggacagctgggaacttgcaaaaaggggctggaatccagatgacaccaagtaacgctgatggcgcgagggaggc

SEQ ID NO: 3498 - DNA, 495 bp, Artificial Sequence
  source: /note="Description of Artificial Sequence: Synthetic polynucleotide"
gccttgccagcccgctcagatgacaccgtctcctattccacagatcacacaggtgctggagtctcccagtccccaaggtacaaagtcgcaaagaggggacgggatgtagctctcaggtgtgattcaatttcgggtcatgtaaccctttattggtaccgacagaccctggggcagggctcagaggttctgacttactcccagagtgatgctcaacgagacaaatcagggcggcccagtggtcggttctctgcagagaggcctgagagatccgtctccactctgaagatccagcgcacagagcagggggactcagctgtgtatctctgtgccagcagtgaatgacaccgtctcctagtcgacaatgaaaaactgttttttggcagtggaacccagctctctgtcttgggtatgtaaaagacttctttcgggatagtgtatcataaggtcggagttccaggagatgacaccgtctcctactgatggcgcgagggaggc

SEQ ID NO: 3499 - DNA, 495 bp, Artificial Sequence
  source: /note="Description of Artificial Sequence: Synthetic polynucleotide"
gccttgccagcccgctcagatgacaccagagtgtcttccacagatcacacaggtgctggagtctcccagtccccaaggtacaaagtcgcaaagaggggacgggatgtagctctcaggtgtgattcaatttcgggtcatgtaaccctttattggtaccgacagaccctggggcagggctcagaggttctgacttactcccagagtgatgctcaacgagacaaatcagggcggcccagtggtcggttctctgcagagaggcctgagagatccgtctccactctgaagatccagcgcacagagcagggggactcagctgtgtatctctgtgccagcagtgaatgacaccagagtgtcgtcgacatcagccccagcattttggtgatgggactcgactctccatcctaggtaagttgcagaatcagggtggtatggccattgtcccttgaaggcagagttctctatgacaccagagtgtcctgatggcgcgagggaggc

SEQ ID NO: 3500 - DNA, 495 bp, Artificial Sequence
  source: /note="Description of Artificial Sequence: Synthetic polynucleotide"
gccttgccagcccgctcagatgacaccgttccgaattccacagatcacacaggtgctggagtctcccagtccccaaggtacaaagtcgcaaagaggggacgggatgtagctctcaggtgtgattcaatttcgggtcatgtaaccctttattggtaccgacagaccctggggcagggctcagaggttctgacttactcccagagtgatgctcaacgagacaaatcagggcggcccagtggtcggttctctgcagagaggcctgagagatccgtctccactctgaagatccagcgcacagagcagggggactcagctgtgtatctctgtgccagcagtgaatgacaccgttccgaagtcgacataattcacccctccactttgggaacgggaccaggctcactgtgacaggtatgggggctccactcttgactcgggggtgcctgggtttgactgcaatgatatgacaccgttccgaactgatggcgcgagggaggc

SEQ ID NO: 3501 - DNA, 495 bp, Artificial Sequence
  source: /note="Description of Artificial Sequence: Synthetic polynucleotide"
gccttgccagcccgctcagatgacacccgttacttttccacagatcacacaggtgctggagtctcccagtccccaaggtacaaagtcgcaaagaggggacgggatgtagctctcaggtgtgattcaatttcgggtcatgtaaccctttattggtaccgacagaccctggggcagggctcagaggttctgacttactcccagagtgatgctcaacgagacaaatcagggcggcccagtggtcggttctctgcagagaggcctgagagatccgtctccactctgaagatccagcgcacagagcagggggactcagctgtgtatctctgtgccagcagtgaatgacacccgttacttgtcgacacaatgagcagttcttcgggccagggacacggctcaccgtgctaggtaagaagggggctccaggtgggagagagggtgagcagcccagcctgcacgacccatgacacccgttacttctgatggcgcgagggaggc

SEQ ID NO: 3502 - DNA, 495 bp, Artificial Sequence
  source: /note="Description of Artificial Sequence: Synthetic polynucleotide"
gccttgccagcccgctcagatgacacctaggagacttccacagatcacacaggtgctggagtctcccagtccccaaggtacaaagtcgcaaagaggggacgggatgtagctctcaggtgtgattcaatttcgggtcatgtaaccctttattggtaccgacagaccctggggcagggctcagaggttctgacttactcccagagtgatgctcaacgagacaaatcagggcggcccagtggtcggttctctgcagagaggcctgagagatccgtctccactctgaagatccagcgcacagagcagggggactcagctgtgtatctctgtgccagcagtgaatgacacctaggagacgtcgacaccggggagctgttttttggagaaggctctaggctgaccgtactgggtaaggaggcggttggggctccggagagctccgagagggcgggatgggcagaggatgacacctaggagacctgatggcgcgagggaggc

SEQ ID NO: 3503 - DNA, 495 bp, Artificial Sequence
  source: /note="Description of Artificial Sequence: Synthetic polynucleotide"
gccttgccagcccgctcagatgacaccgtgtctacttccacagatcacacaggtgctggagtctcccagtccccaaggtacaaagtcgcaaagaggggacgggatgtagctctcaggtgtgattcaatttcgggtcatgtaaccctttattggtaccgacagaccctggggcagggctcagaggttctgacttactcccagagtgatgctcaacgagacaaatcagggcggcccagtggtcggttctctgcagagaggcctgagagatccgtctccactctgaagatccagcgcacagagcagggggactcagctgtgtatctctgtgccagcagtgaatgacaccgtgtctacgtcgacagatacgcagtattttggcccaggcacccggctgacagtgctcggtaagcgggggctcccgctgaagccccggaactggggagggggcgccccgggacgcatgacaccgtgtctacctgatggcgcgagggaggc

SEQ ID NO: 3504 - DNA, 495 bp, Artificial Sequence
  source: /note="Description of Artificial Sequence: Synthetic polynucleotide"
gccttgccagcccgctcagatgacaccgtacagtgttccacagatcacacaggtgctggagtctcccagtccccaaggtacaaagtcgcaaagaggggacgggatgtagctctcaggtgtgattcaatttcgggtcatgtaaccctttattggtaccgacagaccctggggcagggctcagaggttctgacttactcccagagtgatgctcaacgagacaaatcagggcggcccagtggtcggttctctgcagagaggcctgagagatccgtctccactctgaagatccagcgcacagagcagggggactcagctgtgtatctctgtgccagcagtgaatgacaccgtacagtggtcgacaaaacattcagtacttcggcgccgggacccggctctcagtgctgggtaagctggggccgccgggggaccggggacgagactgcgctcgggtttttgtgcgatgacaccgtacagtgctgatggcgcgagggaggc

SEQ ID NO: 3505 - DNA, 495 bp, Artificial Sequence
  source: /note="Description of Artificial Sequence: Synthetic polynucleotide"
gccttgccagcccgctcagatgacaccggatcatcttccacagatcacacaggtgctggagtctcccagtccccaaggtacaaagtcgcaaagaggggacgggatgtagctctcaggtgtgattcaatttcgggtcatgtaaccctttattggtaccgacagaccctggggcagggctcagaggttctgacttactcccagagtgatgctcaacgagacaaatcagggcggcccagtggtcggttctctgcagagaggcctgagagatccgtctccactctgaagatccagcgcacagagcagggggactcagctgtgtatctctgtgccagcagtgaatgacaccggatcatcgtcgacgagacccagtacttcgggccaggcacgcggctcctggtgctcggtgagcgcgggctgctggggcgcgggcgcgggcggcttgggtctggtttttgcggggatgacaccggatcatcctgatggcgcgagggaggc

SEQ ID NO: 3506 - DNA, 495 bp, Artificial Sequence
  source: /note="Description of Artificial Sequence: Synthetic polynucleotide"
gccttgccagcccgctcagatgacacctattggcgttccacagatcacacaggtgctggagtctcccagtccccaaggtacaaagtcgcaaagaggggacgggatgtagctctcaggtgtgattcaatttcgggtcatgtaaccctttattggtaccgacagaccctggggcagggctcagaggttctgacttactcccagagtgatgctcaacgagacaaatcagggcggcccagtggtcggttctctgcagagaggcctgagagatccgtctccactctgaagatccagcgcacagagcagggggactcagctgtgtatctctgtgccagcagtgaatgacacctattggcggtcgacgggccaacgtcctgactttcggggccggcagcaggctgaccgtgctgggtgagttttcgcgggaccacccgggcggcgggattcaggtggaaggcggcggatgacacctattggcgctgatggcgcgagggaggc

SEQ ID NO: 3507 - DNA, 495 bp, Artificial Sequence
  source: /note="Description of Artificial Sequence: Synthetic polynucleotide"
gccttgccagcccgctcagatgacaccaggcttgattccacagatcacacaggtgctggagtctcccagtccccaaggtacaaagtcgcaaagaggggacgggatgtagctctcaggtgtgattcaatttcgggtcatgtaaccctttattggtaccgacagaccctggggcagggctcagaggttctgacttactcccagagtgatgctcaacgagacaaatcagggcggcccagtggtcggttctctgcagagaggcctgagagatccgtctccactctgaagatccagcgcacagagcagggggactcagctgtgtatctctgtgccagcagtgaatgacaccaggcttgagtcgacacgagcagtacttcgggccgggcaccaggctcacggtcacaggtgagattcgggcgtctccccaccttccagcccctcggtccccggagtcggagggtggatgacaccaggcttgactgatggcgcgagggaggc

SEQ ID NO: 3508 - DNA, 495 bp, Artificial Sequence
  source: /note="Description of Artificial Sequence: Synthetic polynucleotide"
gccttgccagcccgctcagcttcacgagacactcttttccacagatcacacaggtgctggagtctcccagtccccaaggtacgaagtcacacagaggggacaggatgtagctcccaggtgtgatccaatttcgggtcaggtaaccctttattggtaccgacagaccctggggcagggccaagagtttctgacttccttccaggatgaaactcaacaagataaatcagggctgctcagtgatcaattctccacagagaggtctgaggatctttctccacctgaagatccagcgcacagagcaagggcgactcggctgtgtatctctgtgccagaagtgacttcacgagacactctgtcgacactgaagctttctttggacaaggcaccagactcacagttgtaggtaagacatttttcaggttcttttgcagatccgtcacagggaaaagtgggtccacagcttcacgagacactctctgatggcgcgagggaggc

SEQ ID NO: 3509 - DNA, 495 bp, Artificial Sequence
  source: /note="Description of Artificial Sequence: Synthetic polynucleotide"
gccttgccagcccgctcagcttcacgattcggaactttccacagatcacacaggtgctggagtctcccagtccccaaggtacgaagtcacacagaggggacaggatgtagctcccaggtgtgatccaatttcgggtcaggtaaccctttattggtaccgacagaccctggggcagggccaagagtttctgacttccttccaggatgaaactcaacaagataaatcagggctgctcagtgatcaattctccacagagaggtctgaggatctttctccacctgaagatccagcgcacagagcaagggcgactcggctgtgtatctctgtgccagaagtgacttcacgattcggaacgtcgactatggctacaccttcggttcggggaccaggttaaccgttgtaggtaaggctgggggtctctaggaggggtgcgatgagggaggactctgtcctgggaaatcttcacgattcggaacctgatggcgcgagggaggc

SEQ ID NO: 3510 - DNA, 495 bp, Artificial Sequence
  source: /note="Description of Artificial Sequence: Synthetic polynucleotide"
gccttgccagcccgctcagcttcacgaaagtaacgtttccacagatcacacaggtgctggagtctcccagtccccaaggtacgaagtcacacagaggggacaggatgtagctcccaggtgtgatccaatttcgggtcaggtaaccctttattggtaccgacagaccctggggcagggccaagagtttctgacttccttccaggatgaaactcaacaagataaatcagggctgctcagtgatcaattctccacagagaggtctgaggatctttctccacctgaagatccagcgcacagagcaagggcgactcggctgtgtatctctgtgccagaagtgacttcacgaaagtaacggtcgacgaaacaccatatattttggagagggaagttggctcactgttgtaggtgagtaagtcaaggctggacagctgggaacttgcaaaaaggggctggaatccagcttcacgaaagtaacgctgatggcgcgagggaggc

SEQ ID NO: 3511 - DNA, 495 bp, Artificial Sequence
  source: /note="Description of Artificial Sequence: Synthetic polynucleotide"
gccttgccagcccgctcagcttcacgagtctcctatttccacagatcacacaggtgctggagtctcccagtccccaaggtacgaagtcacacagaggggacaggatgtagctcccaggtgtgatccaatttcgggtcaggtaaccctttattggtaccgacagaccctggggcagggccaagagtttctgacttccttccaggatgaaactcaacaagataaatcagggctgctcagtgatcaattctccacagagaggtctgaggatctttctccacctgaagatccagcgcacagagcaagggcgactcggctgtgtatctctgtgccagaagtgacttcacgagtctcctagtcgacaatgaaaaactgttttttggcagtggaacccagctctctgtcttgggtatgtaaaagacttctttcgggatagtgtatcataaggtcggagttccaggagcttcacgagtctcctactgatggcgcgagggaggc

SEQ ID NO: 3512 - DNA, 495 bp, Artificial Sequence
  source: /note="Description of Artificial Sequence: Synthetic polynucleotide"
gccttgccagcccgctcagcttcacgaagagtgtctttccacagatcacacaggtgctggagtctcccagtccccaaggtacgaagtcacacagaggggacaggatgtagctcccaggtgtgatccaatttcgggtcaggtaaccctttattggtaccgacagaccctggggcagggccaagagtttctgacttccttccaggatgaaactcaacaagataaatcagggctgctcagtgatcaattctccacagagaggtctgaggatctttctccacctgaagatccagcgcacagagcaagggcgactcggctgtgtatctctgtgccagaagtgacttcacgaagagtgtcgtcgacatcagccccagcattttggtgatgggactcgactctccatcctaggtaagttgcagaatcagggtggtatggccattgtcccttgaaggcagagttctctcttcacgaagagtgtcctgatggcgcgagggaggc

SEQ ID NO: 3513 - DNA, 495 bp, Artificial Sequence
  source: /note="Description of Artificial Sequence: Synthetic polynucleotide"
gccttgccagcccgctcagcttcacgagttccgaatttccacagatcacacaggtgctggagtctcccagtccccaaggtacgaagtcacacagaggggacaggatgtagctcccaggtgtgatccaatttcgggtcaggtaaccctttattggtaccgacagaccctggggcagggccaagagtttctgacttccttccaggatgaaactcaacaagataaatcagggctgctcagtgatcaattctccacagagaggtctgaggatctttctccacctgaagatccagcgcacagagcaagggcgactcggctgtgtatctctgtgccagaagtgacttcacgagttccgaagtcgacataattcacccctccactttgggaacgggaccaggctcactgtgacaggtatgggggctccactcttgactcgggggtgcctgggtttgactgcaatgatcttcacgagttccgaactgatggcgcgagggaggc

SEQ ID NO: 3514 - DNA, 495 bp, Artificial Sequence
  source: /note="Description of Artificial Sequence: Synthetic polynucleotide"
gccttgccagcccgctcagcttcacgacgttactttttccacagatcacacaggtgctggagtctcccagtccccaaggtacgaagtcacacagaggggacaggatgtagctcccaggtgtgatccaatttcgggtcaggtaaccctttattggtaccgacagaccctggggcagggccaagagtttctgacttccttccaggatgaaactcaacaagataaatcagggctgctcagtgatcaattctccacagagaggtctgaggatctttctccacctgaagatccagcgcacagagcaagggcgactcggctgtgtatctctgtgccagaagtgacttcacgacgttacttgtcgacacaatgagcagttcttcgggccagggacacggctcaccgtgctaggtaagaagggggctccaggtgggagagagggtgagcagcccagcctgcacgaccccttcacgacgttacttctgatggcgcgagggaggc

SEQ ID NO: 3515 - DNA, 495 bp, Artificial Sequence
  source: /note="Description of Artificial Sequence: Synthetic polynucleotide"
gccttgccagcccgctcagcttcacgataggagactttccacagatcacacaggtgctggagtctcccagtccccaaggtacgaagtcacacagaggggacaggatgtagctcccaggtgtgatccaatttcgggtcaggtaaccctttattggtaccgacagaccctggggcagggccaagagtttctgacttccttccaggatgaaactcaacaagataaatcagggctgctcagtgatcaattctccacagagaggtctgaggatctttctccacctgaagatccagcgcacagagcaagggcgactcggctgtgtatctctgtgccagaagtgacttcacgataggagacgtcgacaccggggagctgttttttggagaaggctctaggctgaccgtactgggtaaggaggcggttggggctccggagagctccgagagggcgggatgggcagaggcttcacgataggagacctgatggcgcgagggaggc

SEQ ID NO: 3516 - DNA, 495 bp, Artificial Sequence
  source: /note="Description of Artificial Sequence: Synthetic polynucleotide"
gccttgccagcccgctcagcttcacgagtgtctactttccacagatcacacaggtgctggagtctcccagtccccaaggtacgaagtcacacagaggggacaggatgtagctcccaggtgtgatccaatttcgggtcaggtaaccctttattggtaccgacagaccctggggcagggccaagagtttctgacttccttccaggatgaaactcaacaagataaatcagggctgctcagtgatcaattctccacagagaggtctgaggatctttctccacctgaagatccagcgcacagagcaagggcgactcggctgtgtatctctgtgccagaagtgacttcacgagtgtctacgtcgacagatacgcagtattttggcccaggcacccggctgacagtgctcggtaagcgggggctcccgctgaagccccggaactggggagggggcgccccgggacgccttcacgagtgtctacctgatggcgcgagggaggc

SEQ ID NO: 3517 - DNA, 495 bp, Artificial Sequence
  source: /note="Description of Artificial Sequence: Synthetic polynucleotide"
gccttgccagcccgctcagcttcacgagtacagtgtttccacagatcacacaggtgctggagtctcccagtccccaaggtacgaagtcacacagaggggacaggatgtagctcccaggtgtgatccaatttcgggtcaggtaaccctttattggtaccgacagaccctggggcagggccaagagtttctgacttccttccaggatgaaactcaacaagataaatcagggctgctcagtgatcaattctccacagagaggtctgaggatctttctccacctgaagatccagcgcacagagcaagggcgactcggctgtgtatctctgtgccagaagtgacttcacgagtacagtggtcgacaaaacattcagtacttcggcgccgggacccggctctcagtgctgggtaagctggggccgccgggggaccggggacgagactgcgctcgggtttttgtgcgcttcacgagtacagtgctgatggcgcgagggaggc

SEQ ID NO: 3518 - DNA, 495 bp, Artificial Sequence
  source: /note="Description of Artificial Sequence: Synthetic polynucleotide"
gccttgccagcccgctcagcttcacgaggatcatctttccacagatcacacaggtgctggagtctcccagtccccaaggtacgaagtcacacagaggggacaggatgtagctcccaggtgtgatccaatttcgggtcaggtaaccctttattggtaccgacagaccctggggcagggccaagagtttctgacttccttccaggatgaaactcaacaagataaatcagggctgctcagtgatcaattctccacagagaggtctgaggatctttctccacctgaagatccagcgcacagagcaagggcgactcggctgtgtatctctgtgccagaagtgacttcacgaggatcatcgtcgacgagacccagtacttcgggccaggcacgcggctcctggtgctcggtgagcgcgggctgctggggcgcgggcgcgggcggcttgggtctggtttttgcggggcttcacgaggatcatcctgatggcgcgagggaggc

SEQ ID NO: 3519 - DNA, 495 bp, Artificial Sequence
  source: /note="Description of Artificial Sequence: Synthetic polynucleotide"
gccttgccagcccgctcagcttcacgatattggcgtttccacagatcacacaggtgctggagtctcccagtccccaaggtacgaagtcacacagaggggacaggatgtagctcccaggtgtgatccaatttcgggtcaggtaaccctttattggtaccgacagaccctggggcagggccaagagtttctgacttccttccaggatgaaactcaacaagataaatcagggctgctcagtgatcaattctccacagagaggtctgaggatctttctccacctgaagatccagcgcacagagcaagggcgactcggctgtgtatctctgtgccagaagtgacttcacgatattggcggtcgacgggccaacgtcctgactttcggggccggcagcaggctgaccgtgctgggtgagttttcgcgggaccacccgggcggcgggattcaggtggaaggcggcggcttcacgatattggcgctgatggcgcgagggaggc

SEQ ID NO: 3520 - DNA, 495 bp, Artificial Sequence
  source: /note="Description of Artificial Sequence: Synthetic polynucleotide"
gccttgccagcccgctcagcttcacgaaggcttgatttccacagatcacacaggtgctggagtctcccagtccccaaggtacgaagtcacacagaggggacaggatgtagctcccaggtgtgatccaatttcgggtcaggtaaccctttattggtaccgacagaccctggggcagggccaagagtttctgacttccttccaggatgaaactcaacaagataaatcagggctgctcagtgatcaattctccacagagaggtctgaggatctttctccacctgaagatccagcgcacagagcaagggcgactcggctgtgtatctctgtgccagaagtgacttcacgaaggcttgagtcgacacgagcagtacttcgggccgggcaccaggctcacggtcacaggtgagattcgggcgtctccccaccttccagcccctcggtccccggagtcggagggtggcttcacgaaggcttgactgatggcgcgagggaggc

SEQ ID NO: 3521 - DNA, 495 bp, Artificial Sequence
  source: /note="Description of Artificial Sequence: Synthetic polynucleotide"
gccttgccagcccgctcagagctagtggacactctttccacagatcacacaggtgctggagtctcccagtctcccaggtacaaagtcacaaagaggggacaggatgtagctctcaggtgtgatccaatttcgggtcatgtatccctttattggtaccgacaggccctggggcagggcccagagtttctgacttacttcaattatgaagcccaacaagacaaatcagggctgcccaatgatcggttctctgcagagaggcctgagggatccatctccactctgacgatccagcgcacagagcagcgggactcggccatgtatcgctgtgccagcagtgaagctagtggacactctgtcgacactgaagctttctttggacaaggcaccagactcacagttgtaggtaagacatttttcaggttcttttgcagatccgtcacagggaaaagtgggtccacagagctagtggacactctctgatggcgcgagggaggc

SEQ ID NO: 3522 - DNA, 495 bp, Artificial Sequence
  source: /note="Description of Artificial Sequence: Synthetic polynucleotide"
gccttgccagcccgctcagagctagtgttcggaacttccacagatcacacaggtgctggagtctcccagtctcccaggtacaaagtcacaaagaggggacaggatgtagctctcaggtgtgatccaatttcgggtcatgtatccctttattggtaccgacaggccctggggcagggcccagagtttctgacttacttcaattatgaagcccaacaagacaaatcagggctgcccaatgatcggttctctgcagagaggcctgagggatccatctccactctgacgatccagcgcacagagcagcgggactcggccatgtatcgctgtgccagcagtgaagctagtgttcggaacgtcgactatggctacaccttcggttcggggaccaggttaaccgttgtaggtaaggctgggggtctctaggaggggtgcgatgagggaggactctgtcctgggaaatagctagtgttcggaacctgatggcgcgagggaggc

SEQ ID NO: 3523 - DNA, 495 bp, Artificial Sequence
  source: /note="Description of Artificial Sequence: Synthetic polynucleotide"
gccttgccagcccgctcagagctagtgaagtaacgttccacagatcacacaggtgctggagtctcccagtctcccaggtacaaagtcacaaagaggggacaggatgtagctctcaggtgtgatccaatttcgggtcatgtatccctttattggtaccgacaggccctggggcagggcccagagtttctgacttacttcaattatgaagcccaacaagacaaatcagggctgcccaatgatcggttctctgcagagaggcctgagggatccatctccactctgacgatccagcgcacagagcagcgggactcggccatgtatcgctgtgccagcagtgaagctagtgaagtaacggtcgacgaaacaccatatattttggagagggaagttggctcactgttgtaggtgagtaagtcaaggctggacagctgggaacttgcaaaaaggggctggaatccagagctagtgaagtaacgctgatggcgcgagggaggc

SEQ ID NO: 3524 - DNA, 495 bp, Artificial Sequence
  source: /note="Description of Artificial Sequence: Synthetic polynucleotide"
gccttgccagcccgctcagagctagtggtctcctattccacagatcacacaggtgctggagtctcccagtctcccaggtacaaagtcacaaagaggggacaggatgtagctctcaggtgtgatccaatttcgggtcatgtatccctttattggtaccgacaggccctggggcagggcccagagtttctgacttacttcaattatgaagcccaacaagacaaatcagggctgcccaatgatcggttctctgcagagaggcctgagggatccatctccactctgacgatccagcgcacagagcagcgggactcggccatgtatcgctgtgccagcagtgaagctagtggtctcctagtcgacaatgaaaaactgttttttggcagtggaacccagctctctgtcttgggtatgtaaaagacttctttcgggatagtgtatcataaggtcggagttccaggagagctagtggtctcctactgatggcgcgagggaggc

SEQ ID NO: 3525 - DNA, 495 bp, Artificial Sequence
  source: /note="Description of Artificial Sequence: Synthetic polynucleotide"
gccttgccagcccgctcagagctagtgagagtgtcttccacagatcacacaggtgctggagtctcccagtctcccaggtacaaagtcacaaagaggggacaggatgtagctctcaggtgtgatccaatttcgggtcatgtatccctttattggtaccgacaggccctggggcagggcccagagtttctgacttacttcaattatgaagcccaacaagacaaatcagggctgcccaatgatcggttctctgcagagaggcctgagggatccatctccactctgacgatccagcgcacagagcagcgggactcggccatgtatcgctgtgccagcagtgaagctagtgagagtgtcgtcgacatcagccccagcattttggtgatgggactcgactctccatcctaggtaagttgcagaatcagggtggtatggccattgtcccttgaaggcagagttctctagctagtgagagtgtcctgatggcgcgagggaggc

SEQ ID NO: 3526 - DNA, 495 bp, Artificial Sequence
  source: /note="Description of Artificial Sequence: Synthetic polynucleotide"
gccttgccagcccgctcagagctagtggttccgaattccacagatcacacaggtgctggagtctcccagtctcccaggtacaaagtcacaaagaggggacaggatgtagctctcaggtgtgatccaatttcgggtcatgtatccctttattggtaccgacaggccctggggcagggcccagagtttctgacttacttcaattatgaagcccaacaagacaaatcagggctgcccaatgatcggttctctgcagagaggcctgagggatccatctccactctgacgatccagcgcacagagcagcgggactcggccatgtatcgctgtgccagcagtgaagctagtggttccgaagtcgacataattcacccctccactttgggaacgggaccaggctcactgtgacaggtatgggggctccactcttgactcgggggtgcctgggtttgactgcaatgatagctagtggttccgaactgatggcgcgagggaggc

SEQ ID NO: 3527 - DNA, 495 bp, Artificial Sequence
  source: /note="Description of Artificial Sequence: Synthetic polynucleotide"
gccttgccagcccgctcagagctagtgcgttacttttccacagatcacacaggtgctggagtctcccagtctcccaggtacaaagtcacaaagaggggacaggatgtagctctcaggtgtgatccaatttcgggtcatgtatccctttattggtaccgacaggccctggggcagggcccagagtttctgacttacttcaattatgaagcccaacaagacaaatcagggctgcccaatgatcggttctctgcagagaggcctgagggatccatctccactctgacgatccagcgcacagagcagcgggactcggccatgtatcgctgtgccagcagtgaagctagtgcgttacttgtcgacacaatgagcagttcttcgggccagggacacggctcaccgtgctaggtaagaagggggctccaggtgggagagagggtgagcagcccagcctgcacgacccagctagtgcgttacttctgatggcgcgagggaggc

SEQ ID NO: 3528 - DNA, 495 bp, Artificial Sequence
  source: /note="Description of Artificial Sequence: Synthetic polynucleotide"
gccttgccagcccgctcagagctagtgtaggagacttccacagatcacacaggtgctggagtctcccagtctcccaggtacaaagtcacaaagaggggacaggatgtagctctcaggtgtgatccaatttcgggtcatgtatccctttattggtaccgacaggccctggggcagggcccagagtttctgacttacttcaattatgaagcccaacaagacaaatcagggctgcccaatgatcggttctctgcagagaggcctgagggatccatctccactctgacgatccagcgcacagagcagcgggactcggccatgtatcgctgtgccagcagtgaagctagtgtaggagacgtcgacaccggggagctgttttttggagaaggctctaggctgaccgtactgggtaaggaggcggttggggctccggagagctccgagagggcgggatgggcagaggagctagtgtaggagacctgatggcgcgagggaggc

SEQ ID NO: 3529 - DNA, 495 bp, Artificial Sequence
  source: /note="Description of Artificial Sequence: Synthetic polynucleotide"
gccttgccagcccgctcagagctagtggtgtctacttccacagatcacacaggtgctggagtctcccagtctcccaggtacaaagtcacaaagaggggacaggatgtagctctcaggtgtgatccaatttcgggtcatgtatccctttattggtaccgacaggccctggggcagggcccagagtttctgacttacttcaattatgaagcccaacaagacaaatcagggctgcccaatgatcggttctctgcagagaggcctgagggatccatctccactctgacgatccagcgcacagagcagcgggactcggccatgtatcgctgtgccagcagtgaagctagtggtgtctacgtcgacagatacgcagtattttggcccaggcacccggctgacagtgctcggtaagcgggggctcccgctgaagccccggaactggggagggggcgccccgggacgcagctagtggtgtctacctgatggcgcgagggaggc

SEQ ID NO: 3530 - DNA, 495 bp, Artificial Sequence
  source: /note="Description of Artificial Sequence: Synthetic polynucleotide"
gccttgccagcccgctcagagctagtggtacagtgttccacagatcacacaggtgctggagtctcccagtctcccaggtacaaagtcacaaagaggggacaggatgtagctctcaggtgtgatccaatttcgggtcatgtatccctttattggtaccgacaggccctggggcagggcccagagtttctgacttacttcaattatgaagcccaacaagacaaatcagggctgcccaatgatcggttctctgcagagaggcctgagggatccatctccactctgacgatccagcgcacagagcagcgggactcggccatgtatcgctgtgccagcagtgaagctagtggtacagtggtcgacaaaacattcagtacttcggcgccgggacccggctctcagtgctgggtaagctggggccgccgggggaccggggacgagactgcgctcgggtttttgtgcgagctagtggtacagtgctgatggcgcgagggaggc

SEQ ID NO: 3531 - DNA, 495 bp, Artificial Sequence
  source: /note="Description of Artificial Sequence: Synthetic polynucleotide"
gccttgccagcccgctcagagctagtgggatcatcttccacagatcacacaggtgctggagtctcccagtctcccaggtacaaagtcacaaagaggggacaggatgtagctctcaggtgtgatccaatttcgggtcatgtatccctttattggtaccgacaggccctggggcagggcccagagtttctgacttacttcaattatgaagcccaacaagacaaatcagggctgcccaatgatcggttctctgcagagaggcctgagggatccatctccactctgacgatccagcgcacagagcagcgggactcggccatgtatcgctgtgccagcagtgaagctagtgggatcatcgtcgacgagacccagtacttcgggccaggcacgcggctcctggtgctcggtgagcgcgggctgctggggcgcgggcgcgggcggcttgggtctggtttttgcggggagctagtgggatcatcctgatggcgcgagggaggc

SEQ ID NO: 3532 - DNA, 495 bp, Artificial Sequence
  source: /note="Description of Artificial Sequence: Synthetic polynucleotide"
gccttgccagcccgctcagagctagtgtattggcgttccacagatcacacaggtgctggagtctcccagtctcccaggtacaaagtcacaaagaggggacaggatgtagctctcaggtgtgatccaatttcgggtcatgtatccctttattggtaccgacaggccctggggcagggcccagagtttctgacttacttcaattatgaagcccaacaagacaaatcagggctgcccaatgatcggttctctgcagagaggcctgagggatccatctccactctgacgatccagcgcacagagcagcgggactcggccatgtatcgctgtgccagcagtgaagctagtgtattggcggtcgacgggccaacgtcctgactttcggggccggcagcaggctgaccgtgctgggtgagttttcgcgggaccacccgggcggcgggattcaggtggaaggcggcggagctagtgtattggcgctgatggcgcgagggaggc

SEQ ID NO: 3533 - DNA, 495 bp, Artificial Sequence
  source: /note="Description of Artificial Sequence: Synthetic polynucleotide"
gccttgccagcccgctcagagctagtgaggcttgattccacagatcacacaggtgctggagtctcccagtctcccaggtacaaagtcacaaagaggggacaggatgtagctctcaggtgtgatccaatttcgggtcatgtatccctttattggtaccgacaggccctggggcagggcccagagtttctgacttacttcaattatgaagcccaacaagacaaatcagggctgcccaatgatcggttctctgcagagaggcctgagggatccatctccactctgacgatccagcgcacagagcagcgggactcggccatgtatcgctgtgccagcagtgaagctagtgaggcttgagtcgacacgagcagtacttcgggccgggcaccaggctcacggtcacaggtgagattcgggcgtctccccaccttccagcccctcggtccccggagtcggagggtggagctagtgaggcttgactgatggcgcgagggaggc

SEQ ID NO: 3534 - DNA, 495 bp, Artificial Sequence
  source: /note="Description of Artificial Sequence: Synthetic polynucleotide"
gccttgccagcccgctcagtaaccaaggacactctttccacagatcacacaggtgctggagtctcccagtctcccaggtacaaagtcacaaagaggggacaggatgtaactctcaggtgtgatccaatttcgagtcatgcaaccctttattggtatcaacaggccctggggcagggcccagagtttctgacttacttcaattatgaagctcaaccagacaaatcagggctgcccagtgatcggttctctgcagagaggcctgagggatccatctccactctgacgattcagcgcacagagcagcgggactcagccatgtatcgctgtgccagcagtgataaccaaggacactctgtcgacactgaagctttctttggacaaggcaccagactcacagttgtaggtaagacatttttcaggttcttttgcagatccgtcacagggaaaagtgggtccacagtaaccaaggacactctctgatggcgcgagggaggc

SEQ ID NO: 3535 - DNA, 495 bp, Artificial Sequence
  source: /note="Description of Artificial Sequence: Synthetic polynucleotide"
gccttgccagcccgctcagtaaccaagttcggaacttccacagatcacacaggtgctggagtctcccagtctcccaggtacaaagtcacaaagaggggacaggatgtaactctcaggtgtgatccaatttcgagtcatgcaaccctttattggtatcaacaggccctggggcagggcccagagtttctgacttacttcaattatgaagctcaaccagacaaatcagggctgcccagtgatcggttctctgcagagaggcctgagggatccatctccactctgacgattcagcgcacagagcagcgggactcagccatgtatcgctgtgccagcagtgataaccaagttcggaacgtcgactatggctacaccttcggttcggggaccaggttaaccgttgtaggtaaggctgggggtctctaggaggggtgcgatgagggaggactctgtcctgggaaattaaccaagttcggaacctgatggcgcgagggaggc

SEQ ID NO: 3536 - DNA, 495 bp, Artificial Sequence
  source: /note="Description of Artificial Sequence: Synthetic polynucleotide"
gccttgccagcccgctcagtaaccaagaagtaacgttccacagatcacacaggtgctggagtctcccagtctcccaggtacaaagtcacaaagaggggacaggatgtaactctcaggtgtgatccaatttcgagtcatgcaaccctttattggtatcaacaggccctggggcagggcccagagtttctgacttacttcaattatgaagctcaaccagacaaatcagggctgcccagtgatcggttctctgcagagaggcctgagggatccatctccactctgacgattcagcgcacagagcagcgggactcagccatgtatcgctgtgccagcagtgataaccaagaagtaacggtcgacgaaacaccatatattttggagagggaagttggctcactgttgtaggtgagtaagtcaaggctggacagctgggaacttgcaaaaaggggctggaatccagtaaccaagaagtaacgctgatggcgcgagggaggc

SEQ ID NO: 3537 - DNA, 495 bp, Artificial Sequence
  source: /note="Description of Artificial Sequence: Synthetic polynucleotide"
gccttgccagcccgctcagtaaccaaggtctcctattccacagatcacacaggtgctggagtctcccagtctcccaggtacaaagtcacaaagaggggacaggatgtaactctcaggtgtgatccaatttcgagtcatgcaaccctttattggtatcaacaggccctggggcagggcccagagtttctgacttacttcaattatgaagctcaaccagacaaatcagggctgcccagtgatcggttctctgcagagaggcctgagggatccatctccactctgacgattcagcgcacagagcagcgggactcagccatgtatcgctgtgccagcagtgataaccaaggtctcctagtcgacaatgaaaaactgttttttggcagtggaacccagctctctgtcttgggtatgtaaaagacttctttcgggatagtgtatcataaggtcggagttccaggagtaaccaaggtctcctactgatggcgcgagggaggc

SEQ ID NO: 3538 - DNA, 495 bp, Artificial Sequence
  source: /note="Description of Artificial Sequence: Synthetic polynucleotide"
gccttgccagcccgctcagtaaccaagagagtgtcttccacagatcacacaggtgctggagtctcccagtctcccaggtacaaagtcacaaagaggggacaggatgtaactctcaggtgtgatccaatttcgagtcatgcaaccctttattggtatcaacaggccctggggcagggcccagagtttctgacttacttcaattatgaagctcaaccagacaaatcagggctgcccagtgatcggttctctgcagagaggcctgagggatccatctccactctgacgattcagcgcacagagcagcgggactcagccatgtatcgctgtgccagcagtgataaccaagagagtgtcgtcgacatcagccccagcattttggtgatgggactcgactctccatcctaggtaagttgcagaatcagggtggtatggccattgtcccttgaaggcagagttctcttaaccaagagagtgtcctgatggcgcgagggaggc

SEQ ID NO: 3539 - DNA, 495 bp, Artificial Sequence
  source: /note="Description of Artificial Sequence: Synthetic polynucleotide"
gccttgccagcccgctcagtaaccaaggttccgaattccacagatcacacaggtgctggagtctcccagtctcccaggtacaaagtcacaaagaggggacaggatgtaactctcaggtgtgatccaatttcgagtcatgcaaccctttattggtatcaacaggccctggggcagggcccagagtttctgacttacttcaattatgaagctcaaccagacaaatcagggctgcccagtgatcggttctctgcagagaggcctgagggatccatctccactctgacgattcagcgcacagagcagcgggactcagccatgtatcgctgtgccagcagtgataaccaaggttccgaagtcgacataattcacccctccactttgggaacgggaccaggctcactgtgacaggtatgggggctccactcttgactcgggggtgcctgggtttgactgcaatgattaaccaaggttccgaactgatggcgcgagggaggc

SEQ ID NO: 3540 - DNA, 495 bp, Artificial Sequence
  source: /note="Description of Artificial Sequence: Synthetic polynucleotide"
gccttgccagcccgctcagtaaccaagcgttacttttccacagatcacacaggtgctggagtctcccagtctcccaggtacaaagtcacaaagaggggacaggatgtaactctcaggtgtgatccaatttcgagtcatgcaaccctttattggtatcaacaggccctggggcagggcccagagtttctgacttacttcaattatgaagctcaaccagacaaatcagggctgcccagtgatcggttctctgcagagaggcctgagggatccatctccactctgacgattcagcgcacagagcagcgggactcagccatgtatcgctgtgccagcagtgataaccaagcgttacttgtcgacacaatgagcagttcttcgggccagggacacggctcaccgtgctaggtaagaagggggctccaggtgggagagagggtgagcagcccagcctgcacgaccctaaccaagcgttacttctgatggcgcgagggaggc

SEQ ID NO: 3541 - DNA, 495 bp, Artificial Sequence
  source: /note="Description of Artificial Sequence: Synthetic polynucleotide"
gccttgccagcccgctcagtaaccaagtaggagacttccacagatcacacaggtgctggagtctcccagtctcccaggtacaaagtcacaaagaggggacaggatgtaactctcaggtgtgatccaatttcgagtcatgcaaccctttattggtatcaacaggccctggggcagggcccagagtttctgacttacttcaattatgaagctcaaccagacaaatcagggctgcccagtgatcggttctctgcagagaggcctgagggatccatctccactctgacgattcagcgcacagagcagcgggactcagccatgtatcgctgtgccagcagtgataaccaagtaggagacgtcgacaccggggagctgttttttggagaaggctctaggctgaccgtactgggtaaggaggcggttggggctccggagagctccgagagggcgggatgggcagaggtaaccaagtaggagacctgatggcgcgagggaggc

SEQ ID NO: 3542 - DNA, 495 bp, Artificial Sequence
  source: /note="Description of Artificial Sequence: Synthetic polynucleotide"
gccttgccagcccgctcagtaaccaaggtgtctacttccacagatcacacaggtgctggagtctcccagtctcccaggtacaaagtcacaaagaggggacaggatgtaactctcaggtgtgatccaatttcgagtcatgcaaccctttattggtatcaacaggccctggggcagggcccagagtttctgacttacttcaattatgaagctcaaccagacaaatcagggctgcccagtgatcggttctctgcagagaggcctgagggatccatctccactctgacgattcagcgcacagagcagcgggactcagccatgtatcgctgtgccagcagtgataaccaaggtgtctacgtcgacagatacgcagtattttggcccaggcacccggctgacagtgctcggtaagcgggggctcccgctgaagccccggaactggggagggggcgccccgggacgctaaccaaggtgtctacctgatggcgcgagggaggc

SEQ ID NO: 3543 - DNA, 495 bp, Artificial Sequence
  source: /note="Description of Artificial Sequence: Synthetic polynucleotide"
gccttgccagcccgctcagtaaccaaggtacagtgttccacagatcacacaggtgctggagtctcccagtctcccaggtacaaagtcacaaagaggggacaggatgtaactctcaggtgtgatccaatttcgagtcatgcaaccctttattggtatcaacaggccctggggcagggcccagagtttctgacttacttcaattatgaagctcaaccagacaaatcagggctgcccagtgatcggttctctgcagagaggcctgagggatccatctccactctgacgattcagcgcacagagcagcgggactcagccatgtatcgctgtgccagcagtgataaccaaggtacagtggtcgacaaaacattcagtacttcggcgccgggacccggctctcagtgctgggtaagctggggccgccgggggaccggggacgagactgcgctcgggtttttgtgcgtaaccaaggtacagtgctgatggcgcgagggaggc

SEQ ID NO: 3544 - DNA, 495 bp, Artificial Sequence
  source: /note="Description of Artificial Sequence: Synthetic polynucleotide"
gccttgccagcccgctcagtaaccaagggatcatcttccacagatcacacaggtgctggagtctcccagtctcccaggtacaaagtcacaaagaggggacaggatgtaactctcaggtgtgatccaatttcgagtcatgcaaccctttattggtatcaacaggccctggggcagggcccagagtttctgacttacttcaattatgaagctcaaccagacaaatcagggctgcccagtgatcggttctctgcagagaggcctgagggatccatctccactctgacgattcagcgcacagagcagcgggactcagccatgtatcgctgtgccagcagtgataaccaagggatcatcgtcgacgagacccagtacttcgggccaggcacgcggctcctggtgctcggtgagcgcgggctgctggggcgcgggcgcgggcggcttgggtctggtttttgcggggtaaccaagggatcatcctgatggcgcgagggaggc

SEQ ID NO: 3545 - DNA, 495 bp, Artificial Sequence
  source: /note="Description of Artificial Sequence: Synthetic polynucleotide"
gccttgccagcccgctcagtaaccaagtattggcgttccacagatcacacaggtgctggagtctcccagtctcccaggtacaaagtcacaaagaggggacaggatgtaactctcaggtgtgatccaatttcgagtcatgcaaccctttattggtatcaacaggccctggggcagggcccagagtttctgacttacttcaattatgaagctcaaccagacaaatcagggctgcccagtgatcggttctctgcagagaggcctgagggatccatctccactctgacgattcagcgcacagagcagcgggactcagccatgtatcgctgtgccagcagtgataaccaagtattggcggtcgacgggccaacgtcctgactttcggggccggcagcaggctgaccgtgctgggtgagttttcgcgggaccacccgggcggcgggattcaggtggaaggcggcggtaaccaagtattggcgctgatggcgcgagggaggc

SEQ ID NO: 3546 - DNA, 495 bp, Artificial Sequence
  source: /note="Description of Artificial Sequence: Synthetic polynucleotide"
gccttgccagcccgctcagtaaccaagaggcttgattccacagatcacacaggtgctggagtctcccagtctcccaggtacaaagtcacaaagaggggacaggatgtaactctcaggtgtgatccaatttcgagtcatgcaaccctttattggtatcaacaggccctggggcagggcccagagtttctgacttacttcaattatgaagctcaaccagacaaatcagggctgcccagtgatcggttctctgcagagaggcctgagggatccatctccactctgacgattcagcgcacagagcagcgggactcagccatgtatcgctgtgccagcagtgataaccaagaggcttgagtcgacacgagcagtacttcgggccgggcaccaggctcacggtcacaggtgagattcgggcgtctccccaccttccagcccctcggtccccggagtcggagggtggtaaccaagaggcttgactgatggcgcgagggaggc

SEQ ID NO: 3547 - DNA, 495 bp, Artificial Sequence
  source: /note="Description of Artificial Sequence: Synthetic polynucleotide"
gccttgccagcccgctcagcaagaggtgacactctttccacagatcacacaggtgctggagtctcccagtcccctaggtacaaagtcgcaaagagaggacaggatgtagctctcaggtgtgatccaatttcgggtcatgtatcccttttttggtaccaacaggccctggggcaggggccagagtttctgacttatttccagaatgaagctcaactagacaaatcggggctgcccagtgatcgcttctttgcagaaaggcctgagggatccgtctccactctgaagatccagcgcacacagcaggaggactccgccgtgtatctctgtgccagcagtgacaagaggtgacactctgtcgacactgaagctttctttggacaaggcaccagactcacagttgtaggtaagacatttttcaggttcttttgcagatccgtcacagggaaaagtgggtccacagcaagaggtgacactctctgatggcgcgagggaggc

SEQ ID NO: 3548 - DNA, 495 bp, Artificial Sequence
  source: /note="Description of Artificial Sequence: Synthetic polynucleotide"
gccttgccagcccgctcagcaagaggtttcggaacttccacagatcacacaggtgctggagtctcccagtcccctaggtacaaagtcgcaaagagaggacaggatgtagctctcaggtgtgatccaatttcgggtcatgtatcccttttttggtaccaacaggccctggggcaggggccagagtttctgacttatttccagaatgaagctcaactagacaaatcggggctgcccagtgatcgcttctttgcagaaaggcctgagggatccgtctccactctgaagatccagcgcacacagcaggaggactccgccgtgtatctctgtgccagcagtgacaagaggtttcggaacgtcgactatggctacaccttcggttcggggaccaggttaaccgttgtaggtaaggctgggggtctctaggaggggtgcgatgagggaggactctgtcctgggaaatcaagaggtttcggaacctgatggcgcgagggaggc

SEQ ID NO: 3549 - DNA, 495 bp, Artificial Sequence
  source: /note="Description of Artificial Sequence: Synthetic polynucleotide"
gccttgccagcccgctcagcaagaggtaagtaacgttccacagatcacacaggtgctggagtctcccagtcccctaggtacaaagtcgcaaagagaggacaggatgtagctctcaggtgtgatccaatttcgggtcatgtatcccttttttggtaccaacaggccctggggcaggggccagagtttctgacttatttccagaatgaagctcaactagacaaatcggggctgcccagtgatcgcttctttgcagaaaggcctgagggatccgtctccactctgaagatccagcgcacacagcaggaggactccgccgtgtatctctgtgccagcagtgacaagaggtaagtaacggtcgacgaaacaccatatattttggagagggaagttggctcactgttgtaggtgagtaagtcaaggctggacagctgggaacttgcaaaaaggggctggaatccagcaagaggtaagtaacgctgatggcgcgagggaggc

SEQ ID NO: 3550 - DNA, 495 bp, Artificial Sequence
  source: /note="Description of Artificial Sequence: Synthetic polynucleotide"
gccttgccagcccgctcagcaagaggtgtctcctattccacagatcacacaggtgctggagtctcccagtcccctaggtacaaagtcgcaaagagaggacaggatgtagctctcaggtgtgatccaatttcgggtcatgtatcccttttttggtaccaacaggccctggggcaggggccagagtttctgacttatttccagaatgaagctcaactagacaaatcggggctgcccagtgatcgcttctttgcagaaaggcctgagggatccgtctccactctgaagatccagcgcacacagcaggaggactccgccgtgtatctctgtgccagcagtgacaagaggtgtctcctagtcgacaatgaaaaactgttttttggcagtggaacccagctctctgtcttgggtatgtaaaagacttctttcgggatagtgtatcataaggtcggagttccaggagcaagaggtgtctcctactgatggcgcgagggaggc

SEQ ID NO: 3551 - DNA, 495 bp, Artificial Sequence
  source: /note="Description of Artificial Sequence: Synthetic polynucleotide"
gccttgccagcccgctcagcaagaggtagagtgtcttccacagatcacacaggtgctggagtctcccagtcccctaggtacaaagtcgcaaagagaggacaggatgtagctctcaggtgtgatccaatttcgggtcatgtatcccttttttggtaccaacaggccctggggcaggggccagagtttctgacttatttccagaatgaagctcaactagacaaatcggggctgcccagtgatcgcttctttgcagaaaggcctgagggatccgtctccactctgaagatccagcgcacacagcaggaggactccgccgtgtatctctgtgccagcagtgacaagaggtagagtgtcgtcgacatcagccccagcattttggtgatgggactcgactctccatcctaggtaagttgcagaatcagggtggtatggccattgtcccttgaaggcagagttctctcaagaggtagagtgtcctgatggcgcgagggaggc

SEQ ID NO: 3552 - DNA, 495 bp, Artificial Sequence
  source: /note="Description of Artificial Sequence: Synthetic polynucleotide"
gccttgccagcccgctcagcaagaggtgttccgaattccacagatcacacaggtgctggagtctcccagtcccctaggtacaaagtcgcaaagagaggacaggatgtagctctcaggtgtgatccaatttcgggtcatgtatcccttttttggtaccaacaggccctggggcaggggccagagtttctgacttatttccagaatgaagctcaactagacaaatcggggctgcccagtgatcgcttctttgcagaaaggcctgagggatccgtctccactctgaagatccagcgcacacagcaggaggactccgccgtgtatctctgtgccagcagtgacaagaggtgttccgaagtcgacataattcacccctccactttgggaacgggaccaggctcactgtgacaggtatgggggctccactcttgactcgggggtgcctgggtttgactgcaatgatcaagaggtgttccgaactgatggcgcgagggaggc

SEQ ID NO: 3553 - DNA, 495 bp, Artificial Sequence
  source: /note="Description of Artificial Sequence: Synthetic polynucleotide"
gccttgccagcccgctcagcaagaggtcgttacttttccacagatcacacaggtgctggagtctcccagtcccctaggtacaaagtcgcaaagagaggacaggatgtagctctcaggtgtgatccaatttcgggtcatgtatcccttttttggtaccaacaggccctggggcaggggccagagtttctgacttatttccagaatgaagctcaactagacaaatcggggctgcccagtgatcgcttctttgcagaaaggcctgagggatccgtctccactctgaagatccagcgcacacagcaggaggactccgccgtgtatctctgtgccagcagtgacaagaggtcgttacttgtcgacacaatgagcagttcttcgggccagggacacggctcaccgtgctaggtaagaagggggctccaggtgggagagagggtgagcagcccagcctgcacgaccccaagaggtcgttacttctgatggcgcgagggaggc

SEQ ID NO: 3554 - DNA, 495 bp, Artificial Sequence
  source: /note="Description of Artificial Sequence: Synthetic polynucleotide"
gccttgccagcccgctcagcaagaggttaggagacttccacagatcacacaggtgctggagtctcccagtcccctaggtacaaagtcgcaaagagaggacaggatgtagctctcaggtgtgatccaatttcgggtcatgtatcccttttttggtaccaacaggccctggggcaggggccagagtttctgacttatttccagaatgaagctcaactagacaaatcggggctgcccagtgatcgcttctttgcagaaaggcctgagggatccgtctccactctgaagatccagcgcacacagcaggaggactccgccgtgtatctctgtgccagcagtgacaagaggttaggagacgtcgacaccggggagctgttttttggagaaggctctaggctgaccgtactgggtaaggaggcggttggggctccggagagctccgagagggcgggatgggcagaggcaagaggttaggagacctgatggcgcgagggaggc

SEQ ID NO: 3555 - DNA, 495 bp, Artificial Sequence
  source: /note="Description of Artificial Sequence: Synthetic polynucleotide"
gccttgccagcccgctcagcaagaggtgtgtctacttccacagatcacacaggtgctggagtctcccagtcccctaggtacaaagtcgcaaagagaggacaggatgtagctctcaggtgtgatccaatttcgggtcatgtatcccttttttggtaccaacaggccctggggcaggggccagagtttctgacttatttccagaatgaagctcaactagacaaatcggggctgcccagtgatcgcttctttgcagaaaggcctgagggatccgtctccactctgaagatccagcgcacacagcaggaggactccgccgtgtatctctgtgccagcagtgacaagaggtgtgtctacgtcgacagatacgcagtattttggcccaggcacccggctgacagtgctcggtaagcgggggctcccgctgaagccccggaactggggagggggcgccccgggacgccaagaggtgtgtctacctgatggcgcgagggaggc

SEQ ID NO: 3556 - DNA, 495 bp, Artificial Sequence
  source: /note="Description of Artificial Sequence: Synthetic polynucleotide"
gccttgccagcccgctcagcaagaggtgtacagtgttccacagatcacacaggtgctggagtctcccagtcccctaggtacaaagtcgcaaagagaggacaggatgtagctctcaggtgtgatccaatttcgggtcatgtatcccttttttggtaccaacaggccctggggcaggggccagagtttctgacttatttccagaatgaagctcaactagacaaatcggggctgcccagtgatcgcttctttgcagaaaggcctgagggatccgtctccactctgaagatccagcgcacacagcaggaggactccgccgtgtatctctgtgccagcagtgacaagaggtgtacagtggtcgacaaaacattcagtacttcggcgccgggacccggctctcagtgctgggtaagctggggccgccgggggaccggggacgagactgcgctcgggtttttgtgcgcaagaggtgtacagtgctgatggcgcgagggaggc

SEQ ID NO: 3557 - DNA, 495 bp, Artificial Sequence
  source: /note="Description of Artificial Sequence: Synthetic polynucleotide"
gccttgccagcccgctcagcaagaggtggatcatcttccacagatcacacaggtgctggagtctcccagtcccctaggtacaaagtcgcaaagagaggacaggatgtagctctcaggtgtgatccaatttcgggtcatgtatcccttttttggtaccaacaggccctggggcaggggccagagtttctgacttatttccagaatgaagctcaactagacaaatcggggctgcccagtgatcgcttctttgcagaaaggcctgagggatccgtctccactctgaagatccagcgcacacagcaggaggactccgccgtgtatctctgtgccagcagtgacaagaggtggatcatcgtcgacgagacccagtacttcgggccaggcacgcggctcctggtgctcggtgagcgcgggctgctggggcgcgggcgcgggcggcttgggtctggtttttgcggggcaagaggtggatcatcctgatggcgcgagggaggc

SEQ ID NO: 3558 - DNA, 495 bp, Artificial Sequence
  source: /note="Description of Artificial Sequence: Synthetic polynucleotide"
gccttgccagcccgctcagcaagaggttattggcgttccacagatcacacaggtgctggagtctcccagtcccctaggtacaaagtcgcaaagagaggacaggatgtagctctcaggtgtgatccaatttcgggtcatgtatcccttttttggtaccaacaggccctggggcaggggccagagtttctgacttatttccagaatgaagctcaactagacaaatcggggctgcccagtgatcgcttctttgcagaaaggcctgagggatccgtctccactctgaagatccagcgcacacagcaggaggactccgccgtgtatctctgtgccagcagtgacaagaggttattggcggtcgacgggccaacgtcctgactttcggggccggcagcaggctgaccgtgctgggtgagttttcgcgggaccacccgggcggcgggattcaggtggaaggcggcggcaagaggttattggcgctgatggcgcgagggaggc

SEQ ID NO: 3559 - DNA, 495 bp, Artificial Sequence
  source: /note="Description of Artificial Sequence: Synthetic polynucleotide"
gccttgccagcccgctcagcaagaggtaggcttgattccacagatcacacaggtgctggagtctcccagtcccctaggtacaaagtcgcaaagagaggacaggatgtagctctcaggtgtgatccaatttcgggtcatgtatcccttttttggtaccaacaggccctggggcaggggccagagtttctgacttatttccagaatgaagctcaactagacaaatcggggctgcccagtgatcgcttctttgcagaaaggcctgagggatccgtctccactctgaagatccagcgcacacagcaggaggactccgccgtgtatctctgtgccagcagtgacaagaggtaggcttgagtcgacacgagcagtacttcgggccgggcaccaggctcacggtcacaggtgagattcgggcgtctccccaccttccagcccctcggtccccggagtcggagggtggcaagaggtaggcttgactgatggcgcgagggaggc

SEQ ID NO: 3560 - DNA, 495 bp, Artificial Sequence
  source: /note="Description of Artificial Sequence: Synthetic polynucleotide"
gccttgccagcccgctcagagaatcaggacactctctccacagatcacgcagatactggagtctcccagaaccccagacacaagatcacaaagaggggacagaatgtaactttcaggtgtgatccaatttctgaacacaaccgcctttattggtaccgacagaccctggggcagggcccagagtttctgacttacttccagaatgaagctcaactagaaaaatcaaggctgctcagtgatcggttctctgcagagaggcctaagggatctttctccaccttggagatccagcgcacagagcagggggactcggccatgtatctctgtgccagcagtgaagaatcaggacactctgtcgacactgaagctttctttggacaaggcaccagactcacagttgtaggtaagacatttttcaggttcttttgcagatccgtcacagggaaaagtgggtccacagagaatcaggacactctctgatggcgcgagggaggc

SEQ ID NO: 3561 - DNA, 495 bp, Artificial Sequence
  source: /note="Description of Artificial Sequence: Synthetic polynucleotide"
gccttgccagcccgctcagagaatcagttcggaacctccacagatcacgcagatactggagtctcccagaaccccagacacaagatcacaaagaggggacagaatgtaactttcaggtgtgatccaatttctgaacacaaccgcctttattggtaccgacagaccctggggcagggcccagagtttctgacttacttccagaatgaagctcaactagaaaaatcaaggctgctcagtgatcggttctctgcagagaggcctaagggatctttctccaccttggagatccagcgcacagagcagggggactcggccatgtatctctgtgccagcagtgaagaatcagttcggaacgtcgactatggctacaccttcggttcggggaccaggttaaccgttgtaggtaaggctgggggtctctaggaggggtgcgatgagggaggactctgtcctgggaaatagaatcagttcggaacctgatggcgcgagggaggc

SEQ ID NO: 3562 - DNA, 495 bp, Artificial Sequence
  source: /note="Description of Artificial Sequence: Synthetic polynucleotide"
gccttgccagcccgctcagagaatcagaagtaacgctccacagatcacgcagatactggagtctcccagaaccccagacacaagatcacaaagaggggacagaatgtaactttcaggtgtgatccaatttctgaacacaaccgcctttattggtaccgacagaccctggggcagggcccagagtttctgacttacttccagaatgaagctcaactagaaaaatcaaggctgctcagtgatcggttctctgcagagaggcctaagggatctttctccaccttggagatccagcgcacagagcagggggactcggccatgtatctctgtgccagcagtgaagaatcagaagtaacggtcgacgaaacaccatatattttggagagggaagttggctcactgttgtaggtgagtaagtcaaggctggacagctgggaacttgcaaaaaggggctggaatccagagaatcagaagtaacgctgatggcgcgagggaggc

SEQ ID NO: 3563 - DNA, 495 bp, Artificial Sequence
  source: /note="Description of Artificial Sequence: Synthetic polynucleotide"
gccttgccagcccgctcagagaatcaggtctcctactccacagatcacgcagatactggagtctcccagaaccccagacacaagatcacaaagaggggacagaatgtaactttcaggtgtgatccaatttctgaacacaaccgcctttattggtaccgacagaccctggggcagggcccagagtttctgacttacttccagaatgaagctcaactagaaaaatcaaggctgctcagtgatcggttctctgcagagaggcctaagggatctttctccaccttggagatccagcgcacagagcagggggactcggccatgtatctctgtgccagcagtgaagaatcaggtctcctagtcgacaatgaaaaactgttttttggcagtggaacccagctctctgtcttgggtatgtaaaagacttctttcgggatagtgtatcataaggtcggagttccaggagagaatcaggtctcctactgatggcgcgagggaggc

SEQ ID NO: 3564 - DNA, 495 bp, Artificial Sequence
  source: /note="Description of Artificial Sequence: Synthetic polynucleotide"
gccttgccagcccgctcagagaatcagagagtgtcctccacagatcacgcagatactggagtctcccagaaccccagacacaagatcacaaagaggggacagaatgtaactttcaggtgtgatccaatttctgaacacaaccgcctttattggtaccgacagaccctggggcagggcccagagtttctgacttacttccagaatgaagctcaactagaaaaatcaaggctgctcagtgatcggttctctgcagagaggcctaagggatctttctccaccttggagatccagcgcacagagcagggggactcggccatgtatctctgtgccagcagtgaagaatcagagagtgtcgtcgacatcagccccagcattttggtgatgggactcgactctccatcctaggtaagttgcagaatcagggtggtatggccattgtcccttgaaggcagagttctctagaatcagagagtgtcctgatggcgcgagggaggc

SEQ ID NO: 3565 - DNA, 495 bp, Artificial Sequence
  source: /note="Description of Artificial Sequence: Synthetic polynucleotide"
gccttgccagcccgctcagagaatcaggttccgaactccacagatcacgcagatactggagtctcccagaaccccagacacaagatcacaaagaggggacagaatgtaactttcaggtgtgatccaatttctgaacacaaccgcctttattggtaccgacagaccctggggcagggcccagagtttctgacttacttccagaatgaagctcaactagaaaaatcaaggctgctcagtgatcggttctctgcagagaggcctaagggatctttctccaccttggagatccagcgcacagagcagggggactcggccatgtatctctgtgccagcagtgaagaatcaggttccgaagtcgacataattcacccctccactttgggaacgggaccaggctcactgtgacaggtatgggggctccactcttgactcgggggtgcctgggtttgactgcaatgatagaatcaggttccgaactgatggcgcgagggaggc

SEQ ID NO: 3566 - DNA, 495 bp, Artificial Sequence
  source: /note="Description of Artificial Sequence: Synthetic polynucleotide"
gccttgccagcccgctcagagaatcagcgttacttctccacagatcacgcagatactggagtctcccagaaccccagacacaagatcacaaagaggggacagaatgtaactttcaggtgtgatccaatttctgaacacaaccgcctttattggtaccgacagaccctggggcagggcccagagtttctgacttacttccagaatgaagctcaactagaaaaatcaaggctgctcagtgatcggttctctgcagagaggcctaagggatctttctccaccttggagatccagcgcacagagcagggggactcggccatgtatctctgtgccagcagtgaagaatcagcgttacttgtcgacacaatgagcagttcttcgggccagggacacggctcaccgtgctaggtaagaagggggctccaggtgggagagagggtgagcagcccagcctgcacgacccagaatcagcgttacttctgatggcgcgagggaggc

SEQ ID NO: 3567 - DNA, 495 bp, Artificial Sequence
  source: /note="Description of Artificial Sequence: Synthetic polynucleotide"
gccttgccagcccgctcagagaatcagtaggagacctccacagatcacgcagatactggagtctcccagaaccccagacacaagatcacaaagaggggacagaatgtaactttcaggtgtgatccaatttctgaacacaaccgcctttattggtaccgacagaccctggggcagggcccagagtttctgacttacttccagaatgaagctcaactagaaaaatcaaggctgctcagtgatcggttctctgcagagaggcctaagggatctttctccaccttggagatccagcgcacagagcagggggactcggccatgtatctctgtgccagcagtgaagaatcagtaggagacgtcgacaccggggagctgttttttggagaaggctctaggctgaccgtactgggtaaggaggcggttggggctccggagagctccgagagggcgggatgggcagaggagaatcagtaggagacctgatggcgcgagggaggc

SEQ ID NO: 3568 - DNA, 495 bp, Artificial Sequence
  source: /note="Description of Artificial Sequence: Synthetic polynucleotide"
gccttgccagcccgctcagagaatcaggtgtctacctccacagatcacgcagatactggagtctcccagaaccccagacacaagatcacaaagaggggacagaatgtaactttcaggtgtgatccaatttctgaacacaaccgcctttattggtaccgacagaccctggggcagggcccagagtttctgacttacttccagaatgaagctcaactagaaaaatcaaggctgctcagtgatcggttctctgcagagaggcctaagggatctttctccaccttggagatccagcgcacagagcagggggactcggccatgtatctctgtgccagcagtgaagaatcaggtgtctacgtcgacagatacgcagtattttggcccaggcacccggctgacagtgctcggtaagcgggggctcccgctgaagccccggaactggggagggggcgccccgggacgcagaatcaggtgtctacctgatggcgcgagggaggc

SEQ ID NO: 3569 - DNA, 495 bp, Artificial Sequence
  source: /note="Description of Artificial Sequence: Synthetic polynucleotide"
gccttgccagcccgctcagagaatcaggtacagtgctccacagatcacgcagatactggagtctcccagaaccccagacacaagatcacaaagaggggacagaatgtaactttcaggtgtgatccaatttctgaacacaaccgcctttattggtaccgacagaccctggggcagggcccagagtttctgacttacttccagaatgaagctcaactagaaaaatcaaggctgctcagtgatcggttctctgcagagaggcctaagggatctttctccaccttggagatccagcgcacagagcagggggactcggccatgtatctctgtgccagcagtgaagaatcaggtacagtggtcgacaaaacattcagtacttcggcgccgggacccggctctcagtgctgggtaagctggggccgccgggggaccggggacgagactgcgctcgggtttttgtgcgagaatcaggtacagtgctgatggcgcgagggaggc

SEQ ID NO: 3570 - DNA, 495 bp, Artificial Sequence
  source: /note="Description of Artificial Sequence: Synthetic polynucleotide"
gccttgccagcccgctcagagaatcagggatcatcctccacagatcacgcagatactggagtctcccagaaccccagacacaagatcacaaagaggggacagaatgtaactttcaggtgtgatccaatttctgaacacaaccgcctttattggtaccgacagaccctggggcagggcccagagtttctgacttacttccagaatgaagctcaactagaaaaatcaaggctgctcagtgatcggttctctgcagagaggcctaagggatctttctccaccttggagatccagcgcacagagcagggggactcggccatgtatctctgtgccagcagtgaagaatcagggatcatcgtcgacgagacccagtacttcgggccaggcacgcggctcctggtgctcggtgagcgcgggctgctggggcgcgggcgcgggcggcttgggtctggtttttgcggggagaatcagggatcatcctgatggcgcgagggaggc

SEQ ID NO: 3571 - DNA, 495 bp, Artificial Sequence
  source: /note="Description of Artificial Sequence: Synthetic polynucleotide"
gccttgccagcccgctcagagaatcagtattggcgctccacagatcacgcagatactggagtctcccagaaccccagacacaagatcacaaagaggggacagaatgtaactttcaggtgtgatccaatttctgaacacaaccgcctttattggtaccgacagaccctggggcagggcccagagtttctgacttacttccagaatgaagctcaactagaaaaatcaaggctgctcagtgatcggttctctgcagagaggcctaagggatctttctccaccttggagatccagcgcacagagcagggggactcggccatgtatctctgtgccagcagtgaagaatcagtattggcggtcgacgggccaacgtcctgactttcggggccggcagcaggctgaccgtgctgggtgagttttcgcgggaccacccgggcggcgggattcaggtggaaggcggcggagaatcagtattggcgctgatggcgcgagggaggc

SEQ ID NO: 3572 - DNA, 495 bp, Artificial Sequence
  source: /note="Description of Artificial Sequence: Synthetic polynucleotide"
gccttgccagcccgctcagagaatcagaggcttgactccacagatcacgcagatactggagtctcccagaaccccagacacaagatcacaaagaggggacagaatgtaactttcaggtgtgatccaatttctgaacacaaccgcctttattggtaccgacagaccctggggcagggcccagagtttctgacttacttccagaatgaagctcaactagaaaaatcaaggctgctcagtgatcggttctctgcagagaggcctaagggatctttctccaccttggagatccagcgcacagagcagggggactcggccatgtatctctgtgccagcagtgaagaatcagaggcttgagtcgacacgagcagtacttcgggccgggcaccaggctcacggtcacaggtgagattcgggcgtctccccaccttccagcccctcggtccccggagtcggagggtggagaatcagaggcttgactgatggcgcgagggaggc

SEQ ID NO: 3573 - DNA, 495 bp, Artificial Sequence
  source: /note="Description of Artificial Sequence: Synthetic polynucleotide"
gccttgccagcccgctcagagttgaccgacactctctgcctgcctctcccacagcccccatggaggcagggatcagccagataccaagatatcacagacacacagggaaaaagatcatcctgaaatttgctcagattaggaaccattattcagtgttctgttatcaataagaccaagaataggggctgaggctgatccattattcaggtagtattggcagcatgaccaaaggcggtgccaaggaagggtacaatgtctctggaaacaaactcaagcattttccctcaaccctggagtctactagcaccagccagacctctgtacctctgtggcagtgaagttgaccgacactctgtcgacactgaagctttctttggacaaggcaccagactcacagttgtaggtaagacatttttcaggttcttttgcagatccgtcacagggaaaagtgggtccacagagttgaccgacactctctgatggcgcgagggaggc

SEQ ID NO: 3574 - DNA, 495 bp, Artificial Sequence
  source: /note="Description of Artificial Sequence: Synthetic polynucleotide"
gccttgccagcccgctcagagttgaccttcggaacctgcctgcctctcccacagcccccatggaggcagggatcagccagataccaagatatcacagacacacagggaaaaagatcatcctgaaatttgctcagattaggaaccattattcagtgttctgttatcaataagaccaagaataggggctgaggctgatccattattcaggtagtattggcagcatgaccaaaggcggtgccaaggaagggtacaatgtctctggaaacaaactcaagcattttccctcaaccctggagtctactagcaccagccagacctctgtacctctgtggcagtgaagttgaccttcggaacgtcgactatggctacaccttcggttcggggaccaggttaaccgttgtaggtaaggctgggggtctctaggaggggtgcgatgagggaggactctgtcctgggaaatagttgaccttcggaacctgatggcgcgagggaggc

SEQ ID NO: 3575 - DNA, 495 bp, Artificial Sequence
  source: /note="Description of Artificial Sequence: Synthetic polynucleotide"
gccttgccagcccgctcagagttgaccaagtaacgctgcctgcctctcccacagcccccatggaggcagggatcagccagataccaagatatcacagacacacagggaaaaagatcatcctgaaatttgctcagattaggaaccattattcagtgttctgttatcaataagaccaagaataggggctgaggctgatccattattcaggtagtattggcagcatgaccaaaggcggtgccaaggaagggtacaatgtctctggaaacaaactcaagcattttccctcaaccctggagtctactagcaccagccagacctctgtacctctgtggcagtgaagttgaccaagtaacggtcgacgaaacaccatatattttggagagggaagttggctcactgttgtaggtgagtaagtcaaggctggacagctgggaacttgcaaaaaggggctggaatccagagttgaccaagtaacgctgatggcgcgagggaggc

SEQ ID NO: 3576 - DNA, 495 bp, Artificial Sequence
  source: /note="Description of Artificial Sequence: Synthetic polynucleotide"
gccttgccagcccgctcagagttgaccgtctcctactgcctgcctctcccacagcccccatggaggcagggatcagccagataccaagatatcacagacacacagggaaaaagatcatcctgaaatttgctcagattaggaaccattattcagtgttctgttatcaataagaccaagaataggggctgaggctgatccattattcaggtagtattggcagcatgaccaaaggcggtgccaaggaagggtacaatgtctctggaaacaaactcaagcattttccctcaaccctggagtctactagcaccagccagacctctgtacctctgtggcagtgaagttgaccgtctcctagtcgacaatgaaaaactgttttttggcagtggaacccagctctctgtcttgggtatgtaaaagacttctttcgggatagtgtatcataaggtcggagttccaggagagttgaccgtctcctactgatggcgcgagggaggc

SEQ ID NO: 3577 - DNA, 495 bp, Artificial Sequence
  source: /note="Description of Artificial Sequence: Synthetic polynucleotide"
gccttgccagcccgctcagagttgaccagagtgtcctgcctgcctctcccacagcccccatggaggcagggatcagccagataccaagatatcacagacacacagggaaaaagatcatcctgaaatttgctcagattaggaaccattattcagtgttctgttatcaataagaccaagaataggggctgaggctgatccattattcaggtagtattggcagcatgaccaaaggcggtgccaaggaagggtacaatgtctctggaaacaaactcaagcattttccctcaaccctggagtctactagcaccagccagacctctgtacctctgtggcagtgaagttgaccagagtgtcgtcgacatcagccccagcattttggtgatgggactcgactctccatcctaggtaagttgcagaatcagggtggtatggccattgtcccttgaaggcagagttctctagttgaccagagtgtcctgatggcgcgagggaggc

SEQ ID NO: 3578 - DNA, 495 bp, Artificial Sequence
  source: /note="Description of Artificial Sequence: Synthetic polynucleotide"
gccttgccagcccgctcagagttgaccgttccgaactgcctgcctctcccacagcccccatggaggcagggatcagccagataccaagatatcacagacacacagggaaaaagatcatcctgaaatttgctcagattaggaaccattattcagtgttctgttatcaataagaccaagaataggggctgaggctgatccattattcaggtagtattggcagcatgaccaaaggcggtgccaaggaagggtacaatgtctctggaaacaaactcaagcattttccctcaaccctggagtctactagcaccagccagacctctgtacctctgtggcagtgaagttgaccgttccgaagtcgacataattcacccctccactttgggaacgggaccaggctcactgtgacaggtatgggggctccactcttgactcgggggtgcctgggtttgactgcaatgatagttgaccgttccgaactgatggcgcgagggaggc

SEQ ID NO: 3579 - DNA, 495 bp, Artificial Sequence
  source: /note="Description of Artificial Sequence: Synthetic polynucleotide"
gccttgccagcccgctcagagttgacccgttacttctgcctgcctctcccacagcccccatggaggcagggatcagccagataccaagatatcacagacacacagggaaaaagatcatcctgaaatttgctcagattaggaaccattattcagtgttctgttatcaataagaccaagaataggggctgaggctgatccattattcaggtagtattggcagcatgaccaaaggcggtgccaaggaagggtacaatgtctctggaaacaaactcaagcattttccctcaaccctggagtctactagcaccagccagacctctgtacctctgtggcagtgaagttgacccgttacttgtcgacacaatgagcagttcttcgggccagggacacggctcaccgtgctaggtaagaagggggctccaggtgggagagagggtgagcagcccagcctgcacgacccagttgacccgttacttctgatggcgcgagggaggc

SEQ ID NO: 3580 - DNA, 495 bp, Artificial Sequence
  source: /note="Description of Artificial Sequence: Synthetic polynucleotide"
gccttgccagcccgctcagagttgacctaggagacctgcctgcctctcccacagcccccatggaggcagggatcagccagataccaagatatcacagacacacagggaaaaagatcatcctgaaatttgctcagattaggaaccattattcagtgttctgttatcaataagaccaagaataggggctgaggctgatccattattcaggtagtattggcagcatgaccaaaggcggtgccaaggaagggtacaatgtctctggaaacaaactcaagcattttccctcaaccctggagtctactagcaccagccagacctctgtacctctgtggcagtgaagttgacctaggagacgtcgacaccggggagctgttttttggagaaggctctaggctgaccgtactgggtaaggaggcggttggggctccggagagctccgagagggcgggatgggcagaggagttgacctaggagacctgatggcgcgagggaggc

SEQ ID NO: 3581 - DNA, 495 bp, Artificial Sequence
  source: /note="Description of Artificial Sequence: Synthetic polynucleotide"
gccttgccagcccgctcagagttgaccgtgtctacctgcctgcctctcccacagcccccatggaggcagggatcagccagataccaagatatcacagacacacagggaaaaagatcatcctgaaatttgctcagattaggaaccattattcagtgttctgttatcaataagaccaagaataggggctgaggctgatccattattcaggtagtattggcagcatgaccaaaggcggtgccaaggaagggtacaatgtctctggaaacaaactcaagcattttccctcaaccctggagtctactagcaccagccagacctctgtacctctgtggcagtgaagttgaccgtgtctacgtcgacagatacgcagtattttggcccaggcacccggctgacagtgctcggtaagcgggggctcccgctgaagccccggaactggggagggggcgccccgggacgcagttgaccgtgtctacctgatggcgcgagggaggc

SEQ ID NO: 3582 - DNA, 495 bp, Artificial Sequence
  source: /note="Description of Artificial Sequence: Synthetic polynucleotide"
gccttgccagcccgctcagagttgaccgtacagtgctgcctgcctctcccacagcccccatggaggcagggatcagccagataccaagatatcacagacacacagggaaaaagatcatcctgaaatttgctcagattaggaaccattattcagtgttctgttatcaataagaccaagaataggggctgaggctgatccattattcaggtagtattggcagcatgaccaaaggcggtgccaaggaagggtacaatgtctctggaaacaaactcaagcattttccctcaaccctggagtctactagcaccagccagacctctgtacctctgtggcagtgaagttgaccgtacagtggtcgacaaaacattcagtacttcggcgccgggacccggctctcagtgctgggtaagctggggccgccgggggaccggggacgagactgcgctcgggtttttgtgcgagttgaccgtacagtgctgatggcgcgagggaggc

SEQ ID NO: 3583 - DNA, 495 bp, Artificial Sequence
  source: /note="Description of Artificial Sequence: Synthetic polynucleotide"
gccttgccagcccgctcagagttgaccggatcatcctgcctgcctctcccacagcccccatggaggcagggatcagccagataccaagatatcacagacacacagggaaaaagatcatcctgaaatttgctcagattaggaaccattattcagtgttctgttatcaataagaccaagaataggggctgaggctgatccattattcaggtagtattggcagcatgaccaaaggcggtgccaaggaagggtacaatgtctctggaaacaaactcaagcattttccctcaaccctggagtctactagcaccagccagacctctgtacctctgtggcagtgaagttgaccggatcatcgtcgacgagacccagtacttcgggccaggcacgcggctcctggtgctcggtgagcgcgggctgctggggcgcgggcgcgggcggcttgggtctggtttttgcggggagttgaccggatcatcctgatggcgcgagggaggc

SEQ ID NO: 3584 - DNA, 495 bp, Artificial Sequence
  source: /note="Description of Artificial Sequence: Synthetic polynucleotide"
gccttgccagcccgctcagagttgacctattggcgctgcctgcctctcccacagcccccatggaggcagggatcagccagataccaagatatcacagacacacagggaaaaagatcatcctgaaatttgctcagattaggaaccattattcagtgttctgttatcaataagaccaagaataggggctgaggctgatccattattcaggtagtattggcagcatgaccaaaggcggtgccaaggaagggtacaatgtctctggaaacaaactcaagcattttccctcaaccctggagtctactagcaccagccagacctctgtacctctgtggcagtgaagttgacctattggcggtcgacgggccaacgtcctgactttcggggccggcagcaggctgaccgtgctgggtgagttttcgcgggaccacccgggcggcgggattcaggtggaaggcggcggagttgacctattggcgctgatggcgcgagggaggc

SEQ ID NO: 3585 - DNA, 495 bp, Artificial Sequence
  source: /note="Description of Artificial Sequence: Synthetic polynucleotide"
gccttgccagcccgctcagagttgaccaggcttgactgcctgcctctcccacagcccccatggaggcagggatcagccagataccaagatatcacagacacacagggaaaaagatcatcctgaaatttgctcagattaggaaccattattcagtgttctgttatcaataagaccaagaataggggctgaggctgatccattattcaggtagtattggcagcatgaccaaaggcggtgccaaggaagggtacaatgtctctggaaacaaactcaagcattttccctcaaccctggagtctactagcaccagccagacctctgtacctctgtggcagtgaagttgaccaggcttgagtcgacacgagcagtacttcgggccgggcaccaggctcacggtcacaggtgagattcgggcgtctccccaccttccagcccctcggtccccggagtcggagggtggagttgaccaggcttgactgatggcgcgagggaggc

SEQ ID NO: 3586 - DNA, 495 bp, Artificial Sequence
  source: /note="Description of Artificial Sequence: Synthetic polynucleotide"
gccttgccagcccgctcagcgtacgtagacactctttcactttctgtctgcctctccagcaggctctattgatgctgggatcacccagatgccaagatatcacattgtacagaagaaagagatgatcctggaatgtgctcaggttaggaacagtgttctgatatcgacaggacccaagacgggggctgaagcttatccactattcaggcagtggtcacagcaggaccaaagttgatgtcacagaggggtactgtgtttcttgaaacaagcttgagcatttccccaatcctggcatccaccagcaccagccagacctatctgtaccactgtggcagtgacgtacgtagacactctgtcgacactgaagctttctttggacaaggcaccagactcacagttgtaggtaagacatttttcaggttcttttgcagatccgtcacagggaaaagtgggtccacagcgtacgtagacactctctgatggcgcgagggaggc

SEQ ID NO: 3587 - DNA, 495 bp, Artificial Sequence
  source: /note="Description of Artificial Sequence: Synthetic polynucleotide"
gccttgccagcccgctcagcgtacgtattcggaacttcactttctgtctgcctctccagcaggctctattgatgctgggatcacccagatgccaagatatcacattgtacagaagaaagagatgatcctggaatgtgctcaggttaggaacagtgttctgatatcgacaggacccaagacgggggctgaagcttatccactattcaggcagtggtcacagcaggaccaaagttgatgtcacagaggggtactgtgtttcttgaaacaagcttgagcatttccccaatcctggcatccaccagcaccagccagacctatctgtaccactgtggcagtgacgtacgtattcggaacgtcgactatggctacaccttcggttcggggaccaggttaaccgttgtaggtaaggctgggggtctctaggaggggtgcgatgagggaggactctgtcctgggaaatcgtacgtattcggaacctgatggcgcgagggaggc

SEQ ID NO: 3588 - DNA, 495 bp, Artificial Sequence
  source: /note="Description of Artificial Sequence: Synthetic polynucleotide"
gccttgccagcccgctcagcgtacgtaaagtaacgttcactttctgtctgcctctccagcaggctctattgatgctgggatcacccagatgccaagatatcacattgtacagaagaaagagatgatcctggaatgtgctcaggttaggaacagtgttctgatatcgacaggacccaagacgggggctgaagcttatccactattcaggcagtggtcacagcaggaccaaagttgatgtcacagaggggtactgtgtttcttgaaacaagcttgagcatttccccaatcctggcatccaccagcaccagccagacctatctgtaccactgtggcagtgacgtacgtaaagtaacggtcgacgaaacaccatatattttggagagggaagttggctcactgttgtaggtgagtaagtcaaggctggacagctgggaacttgcaaaaaggggctggaatccagcgtacgtaaagtaacgctgatggcgcgagggaggc

SEQ ID NO: 3589 - DNA, 495 bp, Artificial Sequence
  source: /note="Description of Artificial Sequence: Synthetic polynucleotide"
gccttgccagcccgctcagcgtacgtagtctcctattcactttctgtctgcctctccagcaggctctattgatgctgggatcacccagatgccaagatatcacattgtacagaagaaagagatgatcctggaatgtgctcaggttaggaacagtgttctgatatcgacaggacccaagacgggggctgaagcttatccactattcaggcagtggtcacagcaggaccaaagttgatgtcacagaggggtactgtgtttcttgaaacaagcttgagcatttccccaatcctggcatccaccagcaccagccagacctatctgtaccactgtggcagtgacgtacgtagtctcctagtcgacaatgaaaaactgttttttggcagtggaacccagctctctgtcttgggtatgtaaaagacttctttcgggatagtgtatcataaggtcggagttccaggagcgtacgtagtctcctactgatggcgcgagggaggc

SEQ ID NO: 3590 - DNA, 495 bp, Artificial Sequence
  source: /note="Description of Artificial Sequence: Synthetic polynucleotide"
gccttgccagcccgctcagcgtacgtaagagtgtcttcactttctgtctgcctctccagcaggctctattgatgctgggatcacccagatgccaagatatcacattgtacagaagaaagagatgatcctggaatgtgctcaggttaggaacagtgttctgatatcgacaggacccaagacgggggctgaagcttatccactattcaggcagtggtcacagcaggaccaaagttgatgtcacagaggggtactgtgtttcttgaaacaagcttgagcatttccccaatcctggcatccaccagcaccagccagacctatctgtaccactgtggcagtgacgtacgtaagagtgtcgtcgacatcagccccagcattttggtgatgggactcgactctccatcctaggtaagttgcagaatcagggtggtatggccattgtcccttgaaggcagagttctctcgtacgtaagagtgtcctgatggcgcgagggaggc

SEQ ID NO: 3591 - DNA, 495 bp, Artificial Sequence
  source: /note="Description of Artificial Sequence: Synthetic polynucleotide"
gccttgccagcccgctcagcgtacgtagttccgaattcactttctgtctgcctctccagcaggctctattgatgctgggatcacccagatgccaagatatcacattgtacagaagaaagagatgatcctggaatgtgctcaggttaggaacagtgttctgatatcgacaggacccaagacgggggctgaagcttatccactattcaggcagtggtcacagcaggaccaaagttgatgtcacagaggggtactgtgtttcttgaaacaagcttgagcatttccccaatcctggcatccaccagcaccagccagacctatctgtaccactgtggcagtgacgtacgtagttccgaagtcgacataattcacccctccactttgggaacgggaccaggctcactgtgacaggtatgggggctccactcttgactcgggggtgcctgggtttgactgcaatgatcgtacgtagttccgaactgatggcgcgagggaggc

SEQ ID NO: 3592 - DNA, 495 bp, Artificial Sequence
  source: /note="Description of Artificial Sequence: Synthetic polynucleotide"
gccttgccagcccgctcagcgtacgtacgttacttttcactttctgtctgcctctccagcaggctctattgatgctgggatcacccagatgccaagatatcacattgtacagaagaaagagatgatcctggaatgtgctcaggttaggaacagtgttctgatatcgacaggacccaagacgggggctgaagcttatccactattcaggcagtggtcacagcaggaccaaagttgatgtcacagaggggtactgtgtttcttgaaacaagcttgagcatttccccaatcctggcatccaccagcaccagccagacctatctgtaccactgtggcagtgacgtacgtacgttacttgtcgacacaatgagcagttcttcgggccagggacacggctcaccgtgctaggtaagaagggggctccaggtgggagagagggtgagcagcccagcctgcacgaccccgtacgtacgttacttctgatggcgcgagggaggc

SEQ ID NO: 3593 - DNA, 495 bp, Artificial Sequence
  source: /note="Description of Artificial Sequence: Synthetic polynucleotide"
gccttgccagcccgctcagcgtacgtataggagacttcactttctgtctgcctctccagcaggctctattgatgctgggatcacccagatgccaagatatcacattgtacagaagaaagagatgatcctggaatgtgctcaggttaggaacagtgttctgatatcgacaggacccaagacgggggctgaagcttatccactattcaggcagtggtcacagcaggaccaaagttgatgtcacagaggggtactgtgtttcttgaaacaagcttgagcatttccccaatcctggcatccaccagcaccagccagacctatctgtaccactgtggcagtgacgtacgtataggagacgtcgacaccggggagctgttttttggagaaggctctaggctgaccgtactgggtaaggaggcggttggggctccggagagctccgagagggcgggatgggcagaggcgtacgtataggagacctgatggcgcgagggaggc

SEQ ID NO: 3594 - DNA, 495 bp, Artificial Sequence
  source: /note="Description of Artificial Sequence: Synthetic polynucleotide"
gccttgccagcccgctcagcgtacgtagtgtctacttcactttctgtctgcctctccagcaggctctattgatgctgggatcacccagatgccaagatatcacattgtacagaagaaagagatgatcctggaatgtgctcaggttaggaacagtgttctgatatcgacaggacccaagacgggggctgaagcttatccactattcaggcagtggtcacagcaggaccaaagttgatgtcacagaggggtactgtgtttcttgaaacaagcttgagcatttccccaatcctggcatccaccagcaccagccagacctatctgtaccactgtggcagtgacgtacgtagtgtctacgtcgacagatacgcagtattttggcccaggcacccggctgacagtgctcggtaagcgggggctcccgctgaagccccggaactggggagggggcgccccgggacgccgtacgtagtgtctacctgatggcgcgagggaggc

SEQ ID NO: 3595 - DNA, 495 bp, Artificial Sequence
  source: /note="Description of Artificial Sequence: Synthetic polynucleotide"
gccttgccagcccgctcagcgtacgtagtacagtgttcactttctgtctgcctctccagcaggctctattgatgctgggatcacccagatgccaagatatcacattgtacagaagaaagagatgatcctggaatgtgctcaggttaggaacagtgttctgatatcgacaggacccaagacgggggctgaagcttatccactattcaggcagtggtcacagcaggaccaaagttgatgtcacagaggggtactgtgtttcttgaaacaagcttgagcatttccccaatcctggcatccaccagcaccagccagacctatctgtaccactgtggcagtgacgtacgtagtacagtggtcgacaaaacattcagtacttcggcgccgggacccggctctcagtgctgggtaagctggggccgccgggggaccggggacgagactgcgctcgggtttttgtgcgcgtacgtagtacagtgctgatggcgcgagggaggc

SEQ ID NO: 3596 - DNA, 495 bp, Artificial Sequence
  source: /note="Description of Artificial Sequence: Synthetic polynucleotide"
gccttgccagcccgctcagcgtacgtaggatcatcttcactttctgtctgcctctccagcaggctctattgatgctgggatcacccagatgccaagatatcacattgtacagaagaaagagatgatcctggaatgtgctcaggttaggaacagtgttctgatatcgacaggacccaagacgggggctgaagcttatccactattcaggcagtggtcacagcaggaccaaagttgatgtcacagaggggtactgtgtttcttgaaacaagcttgagcatttccccaatcctggcatccaccagcaccagccagacctatctgtaccactgtggcagtgacgtacgtaggatcatcgtcgacgagacccagtacttcgggccaggcacgcggctcctggtgctcggtgagcgcgggctgctggggcgcgggcgcgggcggcttgggtctggtttttgcggggcgtacgtaggatcatcctgatggcgcgagggaggc

SEQ ID NO: 3597 - DNA, 495 bp, Artificial Sequence
  source: /note="Description of Artificial Sequence: Synthetic polynucleotide"
gccttgccagcccgctcagcgtacgtatattggcgttcactttctgtctgcctctccagcaggctctattgatgctgggatcacccagatgccaagatatcacattgtacagaagaaagagatgatcctggaatgtgctcaggttaggaacagtgttctgatatcgacaggacccaagacgggggctgaagcttatccactattcaggcagtggtcacagcaggaccaaagttgatgtcacagaggggtactgtgtttcttgaaacaagcttgagcatttccccaatcctggcatccaccagcaccagccagacctatctgtaccactgtggcagtgacgtacgtatattggcggtcgacgggccaacgtcctgactttcggggccggcagcaggctgaccgtgctgggtgagttttcgcgggaccacccgggcggcgggattcaggtggaaggcggcggcgtacgtatattggcgctgatggcgcgagggaggc

SEQ ID NO: 3598 - DNA, 495 bp, Artificial Sequence
  source: /note="Description of Artificial Sequence: Synthetic polynucleotide"
gccttgccagcccgctcagcgtacgtaaggcttgattcactttctgtctgcctctccagcaggctctattgatgctgggatcacccagatgccaagatatcacattgtacagaagaaagagatgatcctggaatgtgctcaggttaggaacagtgttctgatatcgacaggacccaagacgggggctgaagcttatccactattcaggcagtggtcacagcaggaccaaagttgatgtcacagaggggtactgtgtttcttgaaacaagcttgagcatttccccaatcctggcatccaccagcaccagccagacctatctgtaccactgtggcagtgacgtacgtaaggcttgagtcgacacgagcagtacttcgggccgggcaccaggctcacggtcacaggtgagattcgggcgtctccccaccttccagcccctcggtccccggagtcggagggtggcgtacgtaaggcttgactgatggcgcgagggaggc

SEQ ID NO: 3599 - DNA, 495 bp, Artificial Sequence
  source: /note="Description of Artificial Sequence: Synthetic polynucleotide"
gccttgccagcccgctcagtcggtactgacactcttctgacacacaggcccagtggattctggagtcacacaaaccccaaagcacctgatcacagcaactggacagcgagtgacgctgagatgctcccctaggtctggagacctctctgtgtactggtaccaacagagcctggaccagggcctccagttcctcattcagtattataatggagaagagagagcaaaaggaaacattcttgaacgattctccgcacaacagttccctgacttgcactctgaactaaacctgagctctctggagctgggggactcagctttgtatttctgtgccagcatgatcggtactgacactctgtcgacactgaagctttctttggacaaggcaccagactcacagttgtaggtaagacatttttcaggttcttttgcagatccgtcacagggaaaagtgggtccacagtcggtactgacactctctgatggcgcgagggaggc

SEQ ID NO: 3600 - DNA, 495 bp, Artificial Sequence
  source: /note="Description of Artificial Sequence: Synthetic polynucleotide"
gccttgccagcccgctcagtcggtactttcggaactctgacacacaggcccagtggattctggagtcacacaaaccccaaagcacctgatcacagcaactggacagcgagtgacgctgagatgctcccctaggtctggagacctctctgtgtactggtaccaacagagcctggaccagggcctccagttcctcattcagtattataatggagaagagagagcaaaaggaaacattcttgaacgattctccgcacaacagttccctgacttgcactctgaactaaacctgagctctctggagctgggggactcagctttgtatttctgtgccagcatgatcggtactttcggaacgtcgactatggctacaccttcggttcggggaccaggttaaccgttgtaggtaaggctgggggtctctaggaggggtgcgatgagggaggactctgtcctgggaaattcggtactttcggaacctgatggcgcgagggaggc

SEQ ID NO: 3601 - DNA, 495 bp, Artificial Sequence
  source: /note="Description of Artificial Sequence: Synthetic polynucleotide"
gccttgccagcccgctcagtcggtactaagtaacgtctgacacacaggcccagtggattctggagtcacacaaaccccaaagcacctgatcacagcaactggacagcgagtgacgctgagatgctcccctaggtctggagacctctctgtgtactggtaccaacagagcctggaccagggcctccagttcctcattcagtattataatggagaagagagagcaaaaggaaacattcttgaacgattctccgcacaacagttccctgacttgcactctgaactaaacctgagctctctggagctgggggactcagctttgtatttctgtgccagcatgatcggtactaagtaacggtcgacgaaacaccatatattttggagagggaagttggctcactgttgtaggtgagtaagtcaaggctggacagctgggaacttgcaaaaaggggctggaatccagtcggtactaagtaacgctgatggcgcgagggaggc

SEQ ID NO: 3602 - DNA, 495 bp, Artificial Sequence
  source: /note="Description of Artificial Sequence: Synthetic polynucleotide"
gccttgccagcccgctcagtcggtactgtctcctatctgacacacaggcccagtggattctggagtcacacaaaccccaaagcacctgatcacagcaactggacagcgagtgacgctgagatgctcccctaggtctggagacctctctgtgtactggtaccaacagagcctggaccagggcctccagttcctcattcagtattataatggagaagagagagcaaaaggaaacattcttgaacgattctccgcacaacagttccctgacttgcactctgaactaaacctgagctctctggagctgggggactcagctttgtatttctgtgccagcatgatcggtactgtctcctagtcgacaatgaaaaactgttttttggcagtggaacccagctctctgtcttgggtatgtaaaagacttctttcgggatagtgtatcataaggtcggagttccaggagtcggtactgtctcctactgatggcgcgagggaggc

SEQ ID NO: 3603 - DNA, 495 bp, Artificial Sequence
  source: /note="Description of Artificial Sequence: Synthetic polynucleotide"
gccttgccagcccgctcagtcggtactagagtgtctctgacacacaggcccagtggattctggagtcacacaaaccccaaagcacctgatcacagcaactggacagcgagtgacgctgagatgctcccctaggtctggagacctctctgtgtactggtaccaacagagcctggaccagggcctccagttcctcattcagtattataatggagaagagagagcaaaaggaaacattcttgaacgattctccgcacaacagttccctgacttgcactctgaactaaacctgagctctctggagctgggggactcagctttgtatttctgtgccagcatgatcggtactagagtgtcgtcgacatcagccccagcattttggtgatgggactcgactctccatcctaggtaagttgcagaatcagggtggtatggccattgtcccttgaaggcagagttctcttcggtactagagtgtcctgatggcgcgagggaggc

SEQ ID NO: 3604 - DNA, 495 bp, Artificial Sequence
  source: /note="Description of Artificial Sequence: Synthetic polynucleotide"
gccttgccagcccgctcagtcggtactgttccgaatctgacacacaggcccagtggattctggagtcacacaaaccccaaagcacctgatcacagcaactggacagcgagtgacgctgagatgctcccctaggtctggagacctctctgtgtactggtaccaacagagcctggaccagggcctccagttcctcattcagtattataatggagaagagagagcaaaaggaaacattcttgaacgattctccgcacaacagttccctgacttgcactctgaactaaacctgagctctctggagctgggggactcagctttgtatttctgtgccagcatgatcggtactgttccgaagtcgacataattcacccctccactttgggaacgggaccaggctcactgtgacaggtatgggggctccactcttgactcgggggtgcctgggtttgactgcaatgattcggtactgttccgaactgatggcgcgagggaggc

SEQ ID NO: 3605 - DNA, 495 bp, Artificial Sequence
  source: /note="Description of Artificial Sequence: Synthetic polynucleotide"
gccttgccagcccgctcagtcggtactcgttactttctgacacacaggcccagtggattctggagtcacacaaaccccaaagcacctgatcacagcaactggacagcgagtgacgctgagatgctcccctaggtctggagacctctctgtgtactggtaccaacagagcctggaccagggcctccagttcctcattcagtattataatggagaagagagagcaaaaggaaacattcttgaacgattctccgcacaacagttccctgacttgcactctgaactaaacctgagctctctggagctgggggactcagctttgtatttctgtgccagcatgatcggtactcgttacttgtcgacacaatgagcagttcttcgggccagggacacggctcaccgtgctaggtaagaagggggctccaggtgggagagagggtgagcagcccagcctgcacgaccctcggtactcgttacttctgatggcgcgagggaggc

SEQ ID NO: 3606 - DNA, 495 bp, Artificial Sequence
  source: /note="Description of Artificial Sequence: Synthetic polynucleotide"
gccttgccagcccgctcagtcggtacttaggagactctgacacacaggcccagtggattctggagtcacacaaaccccaaagcacctgatcacagcaactggacagcgagtgacgctgagatgctcccctaggtctggagacctctctgtgtactggtaccaacagagcctggaccagggcctccagttcctcattcagtattataatggagaagagagagcaaaaggaaacattcttgaacgattctccgcacaacagttccctgacttgcactctgaactaaacctgagctctctggagctgggggactcagctttgtatttctgtgccagcatgatcggtacttaggagacgtcgacaccggggagctgttttttggagaaggctctaggctgaccgtactgggtaaggaggcggttggggctccggagagctccgagagggcgggatgggcagaggtcggtacttaggagacctgatggcgcgagggaggc

SEQ ID NO: 3607 - DNA, 495 bp, Artificial Sequence
  source: /note="Description of Artificial Sequence: Synthetic polynucleotide"
gccttgccagcccgctcagtcggtactgtgtctactctgacacacaggcccagtggattctggagtcacacaaaccccaaagcacctgatcacagcaactggacagcgagtgacgctgagatgctcccctaggtctggagacctctctgtgtactggtaccaacagagcctggaccagggcctccagttcctcattcagtattataatggagaagagagagcaaaaggaaacattcttgaacgattctccgcacaacagttccctgacttgcactctgaactaaacctgagctctctggagctgggggactcagctttgtatttctgtgccagcatgatcggtactgtgtctacgtcgacagatacgcagtattttggcccaggcacccggctgacagtgctcggtaagcgggggctcccgctgaagccccggaactggggagggggcgccccgggacgctcggtactgtgtctacctgatggcgcgagggaggc

SEQ ID NO: 3608 - DNA, 495 bp, Artificial Sequence
  source: /note="Description of Artificial Sequence: Synthetic polynucleotide"
gccttgccagcccgctcagtcggtactgtacagtgtctgacacacaggcccagtggattctggagtcacacaaaccccaaagcacctgatcacagcaactggacagcgagtgacgctgagatgctcccctaggtctggagacctctctgtgtactggtaccaacagagcctggaccagggcctccagttcctcattcagtattataatggagaagagagagcaaaaggaaacattcttgaacgattctccgcacaacagttccctgacttgcactctgaactaaacctgagctctctggagctgggggactcagctttgtatttctgtgccagcatgatcggtactgtacagtggtcgacaaaacattcagtacttcggcgccgggacccggctctcagtgctgggtaagctggggccgccgggggaccggggacgagactgcgctcgggtttttgtgcgtcggtactgtacagtgctgatggcgcgagggaggc

SEQ ID NO: 3609 - DNA, 495 bp, Artificial Sequence
  source: /note="Description of Artificial Sequence: Synthetic polynucleotide"
gccttgccagcccgctcagtcggtactggatcatctctgacacacaggcccagtggattctggagtcacacaaaccccaaagcacctgatcacagcaactggacagcgagtgacgctgagatgctcccctaggtctggagacctctctgtgtactggtaccaacagagcctggaccagggcctccagttcctcattcagtattataatggagaagagagagcaaaaggaaacattcttgaacgattctccgcacaacagttccctgacttgcactctgaactaaacctgagctctctggagctgggggactcagctttgtatttctgtgccagcatgatcggtactggatcatcgtcgacgagacccagtacttcgggccaggcacgcggctcctggtgctcggtgagcgcgggctgctggggcgcgggcgcgggcggcttgggtctggtttttgcggggtcggtactggatcatcctgatggcgcgagggaggc

SEQ ID NO: 3610 - DNA, 495 bp, Artificial Sequence
  source: /note="Description of Artificial Sequence: Synthetic polynucleotide"
gccttgccagcccgctcagtcggtacttattggcgtctgacacacaggcccagtggattctggagtcacacaaaccccaaagcacctgatcacagcaactggacagcgagtgacgctgagatgctcccctaggtctggagacctctctgtgtactggtaccaacagagcctggaccagggcctccagttcctcattcagtattataatggagaagagagagcaaaaggaaacattcttgaacgattctccgcacaacagttccctgacttgcactctgaactaaacctgagctctctggagctgggggactcagctttgtatttctgtgccagcatgatcggtacttattggcggtcgacgggccaacgtcctgactttcggggccggcagcaggctgaccgtgctgggtgagttttcgcgggaccacccgggcggcgggattcaggtggaaggcggcggtcggtacttattggcgctgatggcgcgagggaggc

SEQ ID NO: 3611 - DNA, 495 bp, Artificial Sequence
  source: /note="Description of Artificial Sequence: Synthetic polynucleotide"
gccttgccagcccgctcagtcggtactaggcttgatctgacacacaggcccagtggattctggagtcacacaaaccccaaagcacctgatcacagcaactggacagcgagtgacgctgagatgctcccctaggtctggagacctctctgtgtactggtaccaacagagcctggaccagggcctccagttcctcattcagtattataatggagaagagagagcaaaaggaaacattcttgaacgattctccgcacaacagttccctgacttgcactctgaactaaacctgagctctctggagctgggggactcagctttgtatttctgtgccagcatgatcggtactaggcttgagtcgacacgagcagtacttcgggccgggcaccaggctcacggtcacaggtgagattcgggcgtctccccaccttccagcccctcggtccccggagtcggagggtggtcggtactaggcttgactgatggcgcgagggaggc

SEQ ID NO: 3612 - DNA, 495 bp, Artificial Sequence
  source: /note="Description of Artificial Sequence: Synthetic polynucleotide"
gccttgccagcccgctcagccatggatgacactctctctattacaggacacagggatgctgaaatcacccagagcccaagacacaagatcacagagacaggaaggcaggtgaccttggcgtgtcaccagacttggaaccacaacaatatgttctggtatcgacaagacctgggacatgggctgaggctgatccattactcatatggtgttcaagacactaacaaaggagaagtctcagatggctacagtgtctctagatcaaacacagaggacctccccctcactctggagtctgctgcctcctcccagacatctgtatatttctgcgccagcagtgaccatggatgacactctgtcgacactgaagctttctttggacaaggcaccagactcacagttgtaggtaagacatttttcaggttcttttgcagatccgtcacagggaaaagtgggtccacagccatggatgacactctctgatggcgcgagggaggc

SEQ ID NO: 3613 - DNA, 495 bp, Artificial Sequence
  source: /note="Description of Artificial Sequence: Synthetic polynucleotide"
gccttgccagcccgctcagccatggatttcggaacctctattacaggacacagggatgctgaaatcacccagagcccaagacacaagatcacagagacaggaaggcaggtgaccttggcgtgtcaccagacttggaaccacaacaatatgttctggtatcgacaagacctgggacatgggctgaggctgatccattactcatatggtgttcaagacactaacaaaggagaagtctcagatggctacagtgtctctagatcaaacacagaggacctccccctcactctggagtctgctgcctcctcccagacatctgtatatttctgcgccagcagtgaccatggatttcggaacgtcgactatggctacaccttcggttcggggaccaggttaaccgttgtaggtaaggctgggggtctctaggaggggtgcgatgagggaggactctgtcctgggaaatccatggatttcggaacctgatggcgcgagggaggc

SEQ ID NO: 3614 - DNA, 495 bp, Artificial Sequence
  source: /note="Description of Artificial Sequence: Synthetic polynucleotide"
gccttgccagcccgctcagccatggataagtaacgctctattacaggacacagggatgctgaaatcacccagagcccaagacacaagatcacagagacaggaaggcaggtgaccttggcgtgtcaccagacttggaaccacaacaatatgttctggtatcgacaagacctgggacatgggctgaggctgatccattactcatatggtgttcaagacactaacaaaggagaagtctcagatggctacagtgtctctagatcaaacacagaggacctccccctcactctggagtctgctgcctcctcccagacatctgtatatttctgcgccagcagtgaccatggataagtaacggtcgacgaaacaccatatattttggagagggaagttggctcactgttgtaggtgagtaagtcaaggctggacagctgggaacttgcaaaaaggggctggaatccagccatggataagtaacgctgatggcgcgagggaggc

SEQ ID NO: 3615 - DNA, 495 bp, Artificial Sequence
  source: /note="Description of Artificial Sequence: Synthetic polynucleotide"
gccttgccagcccgctcagccatggatgtctcctactctattacaggacacagggatgctgaaatcacccagagcccaagacacaagatcacagagacaggaaggcaggtgaccttggcgtgtcaccagacttggaaccacaacaatatgttctggtatcgacaagacctgggacatgggctgaggctgatccattactcatatggtgttcaagacactaacaaaggagaagtctcagatggctacagtgtctctagatcaaacacagaggacctccccctcactctggagtctgctgcctcctcccagacatctgtatatttctgcgccagcagtgaccatggatgtctcctagtcgacaatgaaaaactgttttttggcagtggaacccagctctctgtcttgggtatgtaaaagacttctttcgggatagtgtatcataaggtcggagttccaggagccatggatgtctcctactgatggcgcgagggaggc

SEQ ID NO: 3616 - DNA, 495 bp, Artificial Sequence
  source: /note="Description of Artificial Sequence: Synthetic polynucleotide"
gccttgccagcccgctcagccatggatagagtgtcctctattacaggacacagggatgctgaaatcacccagagcccaagacacaagatcacagagacaggaaggcaggtgaccttggcgtgtcaccagacttggaaccacaacaatatgttctggtatcgacaagacctgggacatgggctgaggctgatccattactcatatggtgttcaagacactaacaaaggagaagtctcagatggctacagtgtctctagatcaaacacagaggacctccccctcactctggagtctgctgcctcctcccagacatctgtatatttctgcgccagcagtgaccatggatagagtgtcgtcgacatcagccccagcattttggtgatgggactcgactctccatcctaggtaagttgcagaatcagggtggtatggccattgtcccttgaaggcagagttctctccatggatagagtgtcctgatggcgcgagggaggc

SEQ ID NO: 3617 - DNA, 495 bp, Artificial Sequence
  source: /note="Description of Artificial Sequence: Synthetic polynucleotide"
gccttgccagcccgctcagccatggatgttccgaactctattacaggacacagggatgctgaaatcacccagagcccaagacacaagatcacagagacaggaaggcaggtgaccttggcgtgtcaccagacttggaaccacaacaatatgttctggtatcgacaagacctgggacatgggctgaggctgatccattactcatatggtgttcaagacactaacaaaggagaagtctcagatggctacagtgtctctagatcaaacacagaggacctccccctcactctggagtctgctgcctcctcccagacatctgtatatttctgcgccagcagtgaccatggatgttccgaagtcgacataattcacccctccactttgggaacgggaccaggctcactgtgacaggtatgggggctccactcttgactcgggggtgcctgggtttgactgcaatgatccatggatgttccgaactgatggcgcgagggaggc

SEQ ID NO: 3618 - DNA, 495 bp, Artificial Sequence
  source: /note="Description of Artificial Sequence: Synthetic polynucleotide"
gccttgccagcccgctcagccatggatcgttacttctctattacaggacacagggatgctgaaatcacccagagcccaagacacaagatcacagagacaggaaggcaggtgaccttggcgtgtcaccagacttggaaccacaacaatatgttctggtatcgacaagacctgggacatgggctgaggctgatccattactcatatggtgttcaagacactaacaaaggagaagtctcagatggctacagtgtctctagatcaaacacagaggacctccccctcactctggagtctgctgcctcctcccagacatctgtatatttctgcgccagcagtgaccatggatcgttacttgtcgacacaatgagcagttcttcgggccagggacacggctcaccgtgctaggtaagaagggggctccaggtgggagagagggtgagcagcccagcctgcacgacccccatggatcgttacttctgatggcgcgagggaggc

SEQ ID NO: 3619 - DNA, 495 bp, Artificial Sequence
  source: /note="Description of Artificial Sequence: Synthetic polynucleotide"
gccttgccagcccgctcagccatggattaggagacctctattacaggacacagggatgctgaaatcacccagagcccaagacacaagatcacagagacaggaaggcaggtgaccttggcgtgtcaccagacttggaaccacaacaatatgttctggtatcgacaagacctgggacatgggctgaggctgatccattactcatatggtgttcaagacactaacaaaggagaagtctcagatggctacagtgtctctagatcaaacacagaggacctccccctcactctggagtctgctgcctcctcccagacatctgtatatttctgcgccagcagtgaccatggattaggagacgtcgacaccggggagctgttttttggagaaggctctaggctgaccgtactgggtaaggaggcggttggggctccggagagctccgagagggcgggatgggcagaggccatggattaggagacctgatggcgcgagggaggc

SEQ ID NO: 3620 - DNA, 495 bp, Artificial Sequence
  source: /note="Description of Artificial Sequence: Synthetic polynucleotide"
gccttgccagcccgctcagccatggatgtgtctacctctattacaggacacagggatgctgaaatcacccagagcccaagacacaagatcacagagacaggaaggcaggtgaccttggcgtgtcaccagacttggaaccacaacaatatgttctggtatcgacaagacctgggacatgggctgaggctgatccattactcatatggtgttcaagacactaacaaaggagaagtctcagatggctacagtgtctctagatcaaacacagaggacctccccctcactctggagtctgctgcctcctcccagacatctgtatatttctgcgccagcagtgaccatggatgtgtctacgtcgacagatacgcagtattttggcccaggcacccggctgacagtgctcggtaagcgggggctcccgctgaagccccggaactggggagggggcgccccgggacgcccatggatgtgtctacctgatggcgcgagggaggc

SEQ ID NO: 3621 - DNA, 495 bp, Artificial Sequence
  source: /note="Description of Artificial Sequence: Synthetic polynucleotide"
gccttgccagcccgctcagccatggatgtacagtgctctattacaggacacagggatgctgaaatcacccagagcccaagacacaagatcacagagacaggaaggcaggtgaccttggcgtgtcaccagacttggaaccacaacaatatgttctggtatcgacaagacctgggacatgggctgaggctgatccattactcatatggtgttcaagacactaacaaaggagaagtctcagatggctacagtgtctctagatcaaacacagaggacctccccctcactctggagtctgctgcctcctcccagacatctgtatatttctgcgccagcagtgaccatggatgtacagtggtcgacaaaacattcagtacttcggcgccgggacccggctctcagtgctgggtaagctggggccgccgggggaccggggacgagactgcgctcgggtttttgtgcgccatggatgtacagtgctgatggcgcgagggaggc

SEQ ID NO: 3622 - DNA, 495 bp, Artificial Sequence
  source: /note="Description of Artificial Sequence: Synthetic polynucleotide"
gccttgccagcccgctcagccatggatggatcatcctctattacaggacacagggatgctgaaatcacccagagcccaagacacaagatcacagagacaggaaggcaggtgaccttggcgtgtcaccagacttggaaccacaacaatatgttctggtatcgacaagacctgggacatgggctgaggctgatccattactcatatggtgttcaagacactaacaaaggagaagtctcagatggctacagtgtctctagatcaaacacagaggacctccccctcactctggagtctgctgcctcctcccagacatctgtatatttctgcgccagcagtgaccatggatggatcatcgtcgacgagacccagtacttcgggccaggcacgcggctcctggtgctcggtgagcgcgggctgctggggcgcgggcgcgggcggcttgggtctggtttttgcggggccatggatggatcatcctgatggcgcgagggaggc

SEQ ID NO: 3623 - DNA, 495 bp, Artificial Sequence
  source: /note="Description of Artificial Sequence: Synthetic polynucleotide"
gccttgccagcccgctcagccatggattattggcgctctattacaggacacagggatgctgaaatcacccagagcccaagacacaagatcacagagacaggaaggcaggtgaccttggcgtgtcaccagacttggaaccacaacaatatgttctggtatcgacaagacctgggacatgggctgaggctgatccattactcatatggtgttcaagacactaacaaaggagaagtctcagatggctacagtgtctctagatcaaacacagaggacctccccctcactctggagtctgctgcctcctcccagacatctgtatatttctgcgccagcagtgaccatggattattggcggtcgacgggccaacgtcctgactttcggggccggcagcaggctgaccgtgctgggtgagttttcgcgggaccacccgggcggcgggattcaggtggaaggcggcggccatggattattggcgctgatggcgcgagggaggc

SEQ ID NO: 3624 - DNA, 495 bp, Artificial Sequence
  source: /note="Description of Artificial Sequence: Synthetic polynucleotide"
gccttgccagcccgctcagccatggataggcttgactctattacaggacacagggatgctgaaatcacccagagcccaagacacaagatcacagagacaggaaggcaggtgaccttggcgtgtcaccagacttggaaccacaacaatatgttctggtatcgacaagacctgggacatgggctgaggctgatccattactcatatggtgttcaagacactaacaaaggagaagtctcagatggctacagtgtctctagatcaaacacagaggacctccccctcactctggagtctgctgcctcctcccagacatctgtatatttctgcgccagcagtgaccatggataggcttgagtcgacacgagcagtacttcgggccgggcaccaggctcacggtcacaggtgagattcgggcgtctccccaccttccagcccctcggtccccggagtcggagggtggccatggataggcttgactgatggcgcgagggaggc

SEQ ID NO: 3625 - DNA, 495 bp, Artificial Sequence
  source: /note="Description of Artificial Sequence: Synthetic polynucleotide"
gccttgccagcccgctcagactgctacgacactctctctattacaggacacagggatgctggaatcacccagagcccaagatacaagatcacagagacaggaaggcaggtgaccttgatgtgtcaccagacttggagccacagctatatgttctggtatcgacaagacctgggacatgggctgaggctgatctattactcagcagctgctgatattacagataaaggagaagtccccgatggctatgttgtctccagatccaagacagagaatttccccctcactctggagtcagctacccgctcccagacatctgtgtatttctgcgccagcagtgaactgctacgacactctgtcgacactgaagctttctttggacaaggcaccagactcacagttgtaggtaagacatttttcaggttcttttgcagatccgtcacagggaaaagtgggtccacagactgctacgacactctctgatggcgcgagggaggc

SEQ ID NO: 3626 - DNA, 495 bp, Artificial Sequence
  source: /note="Description of Artificial Sequence: Synthetic polynucleotide"
gccttgccagcccgctcagactgctacttcggaacctctattacaggacacagggatgctggaatcacccagagcccaagatacaagatcacagagacaggaaggcaggtgaccttgatgtgtcaccagacttggagccacagctatatgttctggtatcgacaagacctgggacatgggctgaggctgatctattactcagcagctgctgatattacagataaaggagaagtccccgatggctatgttgtctccagatccaagacagagaatttccccctcactctggagtcagctacccgctcccagacatctgtgtatttctgcgccagcagtgaactgctacttcggaacgtcgactatggctacaccttcggttcggggaccaggttaaccgttgtaggtaaggctgggggtctctaggaggggtgcgatgagggaggactctgtcctgggaaatactgctacttcggaacctgatggcgcgagggaggc

SEQ ID NO: 3627 - DNA, 495 bp, Artificial Sequence
  source: /note="Description of Artificial Sequence: Synthetic polynucleotide"
gccttgccagcccgctcagactgctacaagtaacgctctattacaggacacagggatgctggaatcacccagagcccaagatacaagatcacagagacaggaaggcaggtgaccttgatgtgtcaccagacttggagccacagctatatgttctggtatcgacaagacctgggacatgggctgaggctgatctattactcagcagctgctgatattacagataaaggagaagtccccgatggctatgttgtctccagatccaagacagagaatttccccctcactctggagtcagctacccgctcccagacatctgtgtatttctgcgccagcagtgaactgctacaagtaacggtcgacgaaacaccatatattttggagagggaagttggctcactgttgtaggtgagtaagtcaaggctggacagctgggaacttgcaaaaaggggctggaatccagactgctacaagtaacgctgatggcgcgagggaggc

SEQ ID NO: 3628 - DNA, 495 bp, Artificial Sequence
  source: /note="Description of Artificial Sequence: Synthetic polynucleotide"
gccttgccagcccgctcagactgctacgtctcctactctattacaggacacagggatgctggaatcacccagagcccaagatacaagatcacagagacaggaaggcaggtgaccttgatgtgtcaccagacttggagccacagctatatgttctggtatcgacaagacctgggacatgggctgaggctgatctattactcagcagctgctgatattacagataaaggagaagtccccgatggctatgttgtctccagatccaagacagagaatttccccctcactctggagtcagctacccgctcccagacatctgtgtatttctgcgccagcagtgaactgctacgtctcctagtcgacaatgaaaaactgttttttggcagtggaacccagctctctgtcttgggtatgtaaaagacttctttcgggatagtgtatcataaggtcggagttccaggagactgctacgtctcctactgatggcgcgagggaggc

SEQ ID NO: 3629 - DNA, 495 bp, Artificial Sequence
  source: /note="Description of Artificial Sequence: Synthetic polynucleotide"
gccttgccagcccgctcagactgctacagagtgtcctctattacaggacacagggatgctggaatcacccagagcccaagatacaagatcacagagacaggaaggcaggtgaccttgatgtgtcaccagacttggagccacagctatatgttctggtatcgacaagacctgggacatgggctgaggctgatctattactcagcagctgctgatattacagataaaggagaagtccccgatggctatgttgtctccagatccaagacagagaatttccccctcactctggagtcagctacccgctcccagacatctgtgtatttctgcgccagcagtgaactgctacagagtgtcgtcgacatcagccccagcattttggtgatgggactcgactctccatcctaggtaagttgcagaatcagggtggtatggccattgtcccttgaaggcagagttctctactgctacagagtgtcctgatggcgcgagggaggc

SEQ ID NO: 3630 - DNA, 495 bp, Artificial Sequence
  source: /note="Description of Artificial Sequence: Synthetic polynucleotide"
gccttgccagcccgctcagactgctacgttccgaactctattacaggacacagggatgctggaatcacccagagcccaagatacaagatcacagagacaggaaggcaggtgaccttgatgtgtcaccagacttggagccacagctatatgttctggtatcgacaagacctgggacatgggctgaggctgatctattactcagcagctgctgatattacagataaaggagaagtccccgatggctatgttgtctccagatccaagacagagaatttccccctcactctggagtcagctacccgctcccagacatctgtgtatttctgcgccagcagtgaactgctacgttccgaagtcgacataattcacccctccactttgggaacgggaccaggctcactgtgacaggtatgggggctccactcttgactcgggggtgcctgggtttgactgcaatgatactgctacgttccgaactgatggcgcgagggaggc

SEQ ID NO: 3631 - DNA, 495 bp, Artificial Sequence
  source: /note="Description of Artificial Sequence: Synthetic polynucleotide"
gccttgccagcccgctcagactgctaccgttacttctctattacaggacacagggatgctggaatcacccagagcccaagatacaagatcacagagacaggaaggcaggtgaccttgatgtgtcaccagacttggagccacagctatatgttctggtatcgacaagacctgggacatgggctgaggctgatctattactcagcagctgctgatattacagataaaggagaagtccccgatggctatgttgtctccagatccaagacagagaatttccccctcactctggagtcagctacccgctcccagacatctgtgtatttctgcgccagcagtgaactgctaccgttacttgtcgacacaatgagcagttcttcgggccagggacacggctcaccgtgctaggtaagaagggggctccaggtgggagagagggtgagcagcccagcctgcacgacccactgctaccgttacttctgatggcgcgagggaggc

SEQ ID NO: 3632 - DNA, 495 bp, Artificial Sequence
  source: /note="Description of Artificial Sequence: Synthetic polynucleotide"
gccttgccagcccgctcagactgctactaggagacctctattacaggacacagggatgctggaatcacccagagcccaagatacaagatcacagagacaggaaggcaggtgaccttgatgtgtcaccagacttggagccacagctatatgttctggtatcgacaagacctgggacatgggctgaggctgatctattactcagcagctgctgatattacagataaaggagaagtccccgatggctatgttgtctccagatccaagacagagaatttccccctcactctggagtcagctacccgctcccagacatctgtgtatttctgcgccagcagtgaactgctactaggagacgtcgacaccggggagctgttttttggagaaggctctaggctgaccgtactgggtaaggaggcggttggggctccggagagctccgagagggcgggatgggcagaggactgctactaggagacctgatggcgcgagggaggc

SEQ ID NO: 3633 - DNA, 495 bp, Artificial Sequence
  source: /note="Description of Artificial Sequence: Synthetic polynucleotide"
gccttgccagcccgctcagactgctacgtgtctacctctattacaggacacagggatgctggaatcacccagagcccaagatacaagatcacagagacaggaaggcaggtgaccttgatgtgtcaccagacttggagccacagctatatgttctggtatcgacaagacctgggacatgggctgaggctgatctattactcagcagctgctgatattacagataaaggagaagtccccgatggctatgttgtctccagatccaagacagagaatttccccctcactctggagtcagctacccgctcccagacatctgtgtatttctgcgccagcagtgaactgctacgtgtctacgtcgacagatacgcagtattttggcccaggcacccggctgacagtgctcggtaagcgggggctcccgctgaagccccggaactggggagggggcgccccgggacgcactgctacgtgtctacctgatggcgcgagggaggc

SEQ ID NO: 3634 - DNA, 495 bp, Artificial Sequence
  source: /note="Description of Artificial Sequence: Synthetic polynucleotide"
gccttgccagcccgctcagactgctacgtacagtgctctattacaggacacagggatgctggaatcacccagagcccaagatacaagatcacagagacaggaaggcaggtgaccttgatgtgtcaccagacttggagccacagctatatgttctggtatcgacaagacctgggacatgggctgaggctgatctattactcagcagctgctgatattacagataaaggagaagtccccgatggctatgttgtctccagatccaagacagagaatttccccctcactctggagtcagctacccgctcccagacatctgtgtatttctgcgccagcagtgaactgctacgtacagtggtcgacaaaacattcagtacttcggcgccgggacccggctctcagtgctgggtaagctggggccgccgggggaccggggacgagactgcgctcgggtttttgtgcgactgctacgtacagtgctgatggcgcgagggaggc

SEQ ID NO: 3635 - DNA, 495 bp, Artificial Sequence
  source: /note="Description of Artificial Sequence: Synthetic polynucleotide"
gccttgccagcccgctcagactgctacggatcatcctctattacaggacacagggatgctggaatcacccagagcccaagatacaagatcacagagacaggaaggcaggtgaccttgatgtgtcaccagacttggagccacagctatatgttctggtatcgacaagacctgggacatgggctgaggctgatctattactcagcagctgctgatattacagataaaggagaagtccccgatggctatgttgtctccagatccaagacagagaatttccccctcactctggagtcagctacccgctcccagacatctgtgtatttctgcgccagcagtgaactgctacggatcatcgtcgacgagacccagtacttcgggccaggcacgcggctcctggtgctcggtgagcgcgggctgctggggcgcgggcgcgggcggcttgggtctggtttttgcggggactgctacggatcatcctgatggcgcgagggaggc

SEQ ID NO: 3636 - DNA, 495 bp, Artificial Sequence
  source: /note="Description of Artificial Sequence: Synthetic polynucleotide"
gccttgccagcccgctcagactgctactattggcgctctattacaggacacagggatgctggaatcacccagagcccaagatacaagatcacagagacaggaaggcaggtgaccttgatgtgtcaccagacttggagccacagctatatgttctggtatcgacaagacctgggacatgggctgaggctgatctattactcagcagctgctgatattacagataaaggagaagtccccgatggctatgttgtctccagatccaagacagagaatttccccctcactctggagtcagctacccgctcccagacatctgtgtatttctgcgccagcagtgaactgctactattggcggtcgacgggccaacgtcctgactttcggggccggcagcaggctgaccgtgctgggtgagttttcgcgggaccacccgggcggcgggattcaggtggaaggcggcggactgctactattggcgctgatggcgcgagggaggc

SEQ ID NO: 3637 - DNA, 495 bp, Artificial Sequence
  source: /note="Description of Artificial Sequence: Synthetic polynucleotide"
gccttgccagcccgctcagactgctacaggcttgactctattacaggacacagggatgctggaatcacccagagcccaagatacaagatcacagagacaggaaggcaggtgaccttgatgtgtcaccagacttggagccacagctatatgttctggtatcgacaagacctgggacatgggctgaggctgatctattactcagcagctgctgatattacagataaaggagaagtccccgatggctatgttgtctccagatccaagacagagaatttccccctcactctggagtcagctacccgctcccagacatctgtgtatttctgcgccagcagtgaactgctacaggcttgagtcgacacgagcagtacttcgggccgggcaccaggctcacggtcacaggtgagattcgggcgtctccccaccttccagcccctcggtccccggagtcggagggtggactgctacaggcttgactgatggcgcgagggaggc

SEQ ID NO: 3638 - DNA, 495 bp, Artificial Sequence
  source: /note="Description of Artificial Sequence: Synthetic polynucleotide"
gccttgccagcccgctcagacgaagatgacactctttctattacaggacacatggatgctggaatcacccagagcccaagacacaaggtcacagagacaggaacaccagtgactctgagatgtcaccagactgagaaccaccgctatatgtactggtatcgacaagacccggggcatgggctgaggctgatccattactcatatggtgttaaagatactgacaaaggagaagtctcagatggctatagtgtctctagatcaaagacagaggatttcctcctcactctggagtccgctaccagctcccagacatctgtgtacttctgtgccatcagtgaacgaagatgacactctgtcgacactgaagctttctttggacaaggcaccagactcacagttgtaggtaagacatttttcaggttcttttgcagatccgtcacagggaaaagtgggtccacagacgaagatgacactctctgatggcgcgagggaggc

SEQ ID NO: 3639 - DNA, 495 bp, Artificial Sequence
  source: /note="Description of Artificial Sequence: Synthetic polynucleotide"
gccttgccagcccgctcagacgaagatttcggaacttctattacaggacacatggatgctggaatcacccagagcccaagacacaaggtcacagagacaggaacaccagtgactctgagatgtcaccagactgagaaccaccgctatatgtactggtatcgacaagacccggggcatgggctgaggctgatccattactcatatggtgttaaagatactgacaaaggagaagtctcagatggctatagtgtctctagatcaaagacagaggatttcctcctcactctggagtccgctaccagctcccagacatctgtgtacttctgtgccatcagtgaacgaagatttcggaacgtcgactatggctacaccttcggttcggggaccaggttaaccgttgtaggtaaggctgggggtctctaggaggggtgcgatgagggaggactctgtcctgggaaatacgaagatttcggaacctgatggcgcgagggaggc

SEQ ID NO: 3640 - DNA, 495 bp, Artificial Sequence
  source: /note="Description of Artificial Sequence: Synthetic polynucleotide"
gccttgccagcccgctcagacgaagataagtaacgttctattacaggacacatggatgctggaatcacccagagcccaagacacaaggtcacagagacaggaacaccagtgactctgagatgtcaccagactgagaaccaccgctatatgtactggtatcgacaagacccggggcatgggctgaggctgatccattactcatatggtgttaaagatactgacaaaggagaagtctcagatggctatagtgtctctagatcaaagacagaggatttcctcctcactctggagtccgctaccagctcccagacatctgtgtacttctgtgccatcagtgaacgaagataagtaacggtcgacgaaacaccatatattttggagagggaagttggctcactgttgtaggtgagtaagtcaaggctggacagctgggaacttgcaaaaaggggctggaatccagacgaagataagtaacgctgatggcgcgagggaggc

SEQ ID NO: 3641 - DNA, 495 bp, Artificial Sequence
  source: /note="Description of Artificial Sequence: Synthetic polynucleotide"
gccttgccagcccgctcagacgaagatgtctcctattctattacaggacacatggatgctggaatcacccagagcccaagacacaaggtcacagagacaggaacaccagtgactctgagatgtcaccagactgagaaccaccgctatatgtactggtatcgacaagacccggggcatgggctgaggctgatccattactcatatggtgttaaagatactgacaaaggagaagtctcagatggctatagtgtctctagatcaaagacagaggatttcctcctcactctggagtccgctaccagctcccagacatctgtgtacttctgtgccatcagtgaacgaagatgtctcctagtcgacaatgaaaaactgttttttggcagtggaacccagctctctgtcttgggtatgtaaaagacttctttcgggatagtgtatcataaggtcggagttccaggagacgaagatgtctcctactgatggcgcgagggaggc

SEQ ID NO: 3642 - DNA, 495 bp, Artificial Sequence
  source: /note="Description of Artificial Sequence: Synthetic polynucleotide"
gccttgccagcccgctcagacgaagatagagtgtcttctattacaggacacatggatgctggaatcacccagagcccaagacacaaggtcacagagacaggaacaccagtgactctgagatgtcaccagactgagaaccaccgctatatgtactggtatcgacaagacccggggcatgggctgaggctgatccattactcatatggtgttaaagatactgacaaaggagaagtctcagatggctatagtgtctctagatcaaagacagaggatttcctcctcactctggagtccgctaccagctcccagacatctgtgtacttctgtgccatcagtgaacgaagatagagtgtcgtcgacatcagccccagcattttggtgatgggactcgactctccatcctaggtaagttgcagaatcagggtggtatggccattgtcccttgaaggcagagttctctacgaagatagagtgtcctgatggcgcgagggaggc

SEQ ID NO: 3643 - DNA, 495 bp, Artificial Sequence
  source: /note="Description of Artificial Sequence: Synthetic polynucleotide"
gccttgccagcccgctcagacgaagatgttccgaattctattacaggacacatggatgctggaatcacccagagcccaagacacaaggtcacagagacaggaacaccagtgactctgagatgtcaccagactgagaaccaccgctatatgtactggtatcgacaagacccggggcatgggctgaggctgatccattactcatatggtgttaaagatactgacaaaggagaagtctcagatggctatagtgtctctagatcaaagacagaggatttcctcctcactctggagtccgctaccagctcccagacatctgtgtacttctgtgccatcagtgaacgaagatgttccgaagtcgacataattcacccctccactttgggaacgggaccaggctcactgtgacaggtatgggggctccactcttgactcgggggtgcctgggtttgactgcaatgatacgaagatgttccgaactgatggcgcgagggaggc

SEQ ID NO: 3644 - DNA, 495 bp, Artificial Sequence
  source: /note="Description of Artificial Sequence: Synthetic polynucleotide"
gccttgccagcccgctcagacgaagatcgttacttttctattacaggacacatggatgctggaatcacccagagcccaagacacaaggtcacagagacaggaacaccagtgactctgagatgtcaccagactgagaaccaccgctatatgtactggtatcgacaagacccggggcatgggctgaggctgatccattactcatatggtgttaaagatactgacaaaggagaagtctcagatggctatagtgtctctagatcaaagacagaggatttcctcctcactctggagtccgctaccagctcccagacatctgtgtacttctgtgccatcagtgaacgaagatcgttacttgtcgacacaatgagcagttcttcgggccagggacacggctcaccgtgctaggtaagaagggggctccaggtgggagagagggtgagcagcccagcctgcacgacccacgaagatcgttacttctgatggcgcgagggaggc

SEQ ID NO: 3645 - DNA, 495 bp, Artificial Sequence
  source: /note="Description of Artificial Sequence: Synthetic polynucleotide"
gccttgccagcccgctcagacgaagattaggagacttctattacaggacacatggatgctggaatcacccagagcccaagacacaaggtcacagagacaggaacaccagtgactctgagatgtcaccagactgagaaccaccgctatatgtactggtatcgacaagacccggggcatgggctgaggctgatccattactcatatggtgttaaagatactgacaaaggagaagtctcagatggctatagtgtctctagatcaaagacagaggatttcctcctcactctggagtccgctaccagctcccagacatctgtgtacttctgtgccatcagtgaacgaagattaggagacgtcgacaccggggagctgttttttggagaaggctctaggctgaccgtactgggtaaggaggcggttggggctccggagagctccgagagggcgggatgggcagaggacgaagattaggagacctgatggcgcgagggaggc

SEQ ID NO: 3646 - DNA, 495 bp, Artificial Sequence
  source: /note="Description of Artificial Sequence: Synthetic polynucleotide"
gccttgccagcccgctcagacgaagatgtgtctacttctattacaggacacatggatgctggaatcacccagagcccaagacacaaggtcacagagacaggaacaccagtgactctgagatgtcaccagactgagaaccaccgctatatgtactggtatcgacaagacccggggcatgggctgaggctgatccattactcatatggtgttaaagatactgacaaaggagaagtctcagatggctatagtgtctctagatcaaagacagaggatttcctcctcactctggagtccgctaccagctcccagacatctgtgtacttctgtgccatcagtgaacgaagatgtgtctacgtcgacagatacgcagtattttggcccaggcacccggctgacagtgctcggtaagcgggggctcccgctgaagccccggaactggggagggggcgccccgggacgcacgaagatgtgtctacctgatggcgcgagggaggc

SEQ ID NO: 3647 - DNA, 495 bp, Artificial Sequence
  source: /note="Description of Artificial Sequence: Synthetic polynucleotide"
gccttgccagcccgctcagacgaagatgtacagtgttctattacaggacacatggatgctggaatcacccagagcccaagacacaaggtcacagagacaggaacaccagtgactctgagatgtcaccagactgagaaccaccgctatatgtactggtatcgacaagacccggggcatgggctgaggctgatccattactcatatggtgttaaagatactgacaaaggagaagtctcagatggctatagtgtctctagatcaaagacagaggatttcctcctcactctggagtccgctaccagctcccagacatctgtgtacttctgtgccatcagtgaacgaagatgtacagtggtcgacaaaacattcagtacttcggcgccgggacccggctctcagtgctgggtaagctggggccgccgggggaccggggacgagactgcgctcgggtttttgtgcgacgaagatgtacagtgctgatggcgcgagggaggc

SEQ ID NO: 3648 - DNA, 495 bp, Artificial Sequence
  source: /note="Description of Artificial Sequence: Synthetic polynucleotide"
gccttgccagcccgctcagacgaagatggatcatcttctattacaggacacatggatgctggaatcacccagagcccaagacacaaggtcacagagacaggaacaccagtgactctgagatgtcaccagactgagaaccaccgctatatgtactggtatcgacaagacccggggcatgggctgaggctgatccattactcatatggtgttaaagatactgacaaaggagaagtctcagatggctatagtgtctctagatcaaagacagaggatttcctcctcactctggagtccgctaccagctcccagacatctgtgtacttctgtgccatcagtgaacgaagatggatcatcgtcgacgagacccagtacttcgggccaggcacgcggctcctggtgctcggtgagcgcgggctgctggggcgcgggcgcgggcggcttgggtctggtttttgcggggacgaagatggatcatcctgatggcgcgagggaggc

SEQ ID NO: 3649 - DNA, 495 bp, Artificial Sequence
  source: /note="Description of Artificial Sequence: Synthetic polynucleotide"
gccttgccagcccgctcagacgaagattattggcgttctattacaggacacatggatgctggaatcacccagagcccaagacacaaggtcacagagacaggaacaccagtgactctgagatgtcaccagactgagaaccaccgctatatgtactggtatcgacaagacccggggcatgggctgaggctgatccattactcatatggtgttaaagatactgacaaaggagaagtctcagatggctatagtgtctctagatcaaagacagaggatttcctcctcactctggagtccgctaccagctcccagacatctgtgtacttctgtgccatcagtgaacgaagattattggcggtcgacgggccaacgtcctgactttcggggccggcagcaggctgaccgtgctgggtgagttttcgcgggaccacccgggcggcgggattcaggtggaaggcggcggacgaagattattggcgctgatggcgcgagggaggc

SEQ ID NO: 3650 - DNA, 495 bp, Artificial Sequence
  source: /note="Description of Artificial Sequence: Synthetic polynucleotide"
gccttgccagcccgctcagacgaagataggcttgattctattacaggacacatggatgctggaatcacccagagcccaagacacaaggtcacagagacaggaacaccagtgactctgagatgtcaccagactgagaaccaccgctatatgtactggtatcgacaagacccggggcatgggctgaggctgatccattactcatatggtgttaaagatactgacaaaggagaagtctcagatggctatagtgtctctagatcaaagacagaggatttcctcctcactctggagtccgctaccagctcccagacatctgtgtacttctgtgccatcagtgaacgaagataggcttgagtcgacacgagcagtacttcgggccgggcaccaggctcacggtcacaggtgagattcgggcgtctccccaccttccagcccctcggtccccggagtcggagggtggacgaagataggcttgactgatggcgcgagggaggc

SEQ ID NO: 3651 - DNA, 495 bp, Artificial Sequence
  source: /note="Description of Artificial Sequence: Synthetic polynucleotide"
gccttgccagcccgctcagactgtggagacactctcccaacagaactctcagaagctgaagttgcccagtcccccagatataagattacagagaaaagccaggctgtggctttttggtgtgatcctatttctggccatgctaccctttactggtaccggcagatcctgggacagggcccggagcttctggttcaatttcaggatgagagtgtagtagatgattcacagttgcctaaggatcgattttctgcagagaggctcaaaggagtagactccactctcaagatccagcctgcagagcttggggactcggccatgtatctctgtgccagcagtgaactgtggagacactctgtcgacactgaagctttctttggacaaggcaccagactcacagttgtaggtaagacatttttcaggttcttttgcagatccgtcacagggaaaagtgggtccacagactgtggagacactctctgatggcgcgagggaggc

SEQ ID NO: 3652 - DNA, 495 bp, Artificial Sequence
  source: /note="Description of Artificial Sequence: Synthetic polynucleotide"
gccttgccagcccgctcagactgtggattcggaaccccaacagaactctcagaagctgaagttgcccagtcccccagatataagattacagagaaaagccaggctgtggctttttggtgtgatcctatttctggccatgctaccctttactggtaccggcagatcctgggacagggcccggagcttctggttcaatttcaggatgagagtgtagtagatgattcacagttgcctaaggatcgattttctgcagagaggctcaaaggagtagactccactctcaagatccagcctgcagagcttggggactcggccatgtatctctgtgccagcagtgaactgtggattcggaacgtcgactatggctacaccttcggttcggggaccaggttaaccgttgtaggtaaggctgggggtctctaggaggggtgcgatgagggaggactctgtcctgggaaatactgtggattcggaacctgatggcgcgagggaggc

SEQ ID NO: 3653 - DNA, 495 bp, Artificial Sequence
  source: /note="Description of Artificial Sequence: Synthetic polynucleotide"
gccttgccagcccgctcagactgtggaaagtaacgcccaacagaactctcagaagctgaagttgcccagtcccccagatataagattacagagaaaagccaggctgtggctttttggtgtgatcctatttctggccatgctaccctttactggtaccggcagatcctgggacagggcccggagcttctggttcaatttcaggatgagagtgtagtagatgattcacagttgcctaaggatcgattttctgcagagaggctcaaaggagtagactccactctcaagatccagcctgcagagcttggggactcggccatgtatctctgtgccagcagtgaactgtggaaagtaacggtcgacgaaacaccatatattttggagagggaagttggctcactgttgtaggtgagtaagtcaaggctggacagctgggaacttgcaaaaaggggctggaatccagactgtggaaagtaacgctgatggcgcgagggaggc

SEQ ID NO: 3654 - DNA, 495 bp, Artificial Sequence
  source: /note="Description of Artificial Sequence: Synthetic polynucleotide"
gccttgccagcccgctcagactgtggagtctcctacccaacagaactctcagaagctgaagttgcccagtcccccagatataagattacagagaaaagccaggctgtggctttttggtgtgatcctatttctggccatgctaccctttactggtaccggcagatcctgggacagggcccggagcttctggttcaatttcaggatgagagtgtagtagatgattcacagttgcctaaggatcgattttctgcagagaggctcaaaggagtagactccactctcaagatccagcctgcagagcttggggactcggccatgtatctctgtgccagcagtgaactgtggagtctcctagtcgacaatgaaaaactgttttttggcagtggaacccagctctctgtcttgggtatgtaaaagacttctttcgggatagtgtatcataaggtcggagttccaggagactgtggagtctcctactgatggcgcgagggaggc

SEQ ID NO: 3655 - DNA, 495 bp, Artificial Sequence
  source: /note="Description of Artificial Sequence: Synthetic polynucleotide"
gccttgccagcccgctcagactgtggaagagtgtccccaacagaactctcagaagctgaagttgcccagtcccccagatataagattacagagaaaagccaggctgtggctttttggtgtgatcctatttctggccatgctaccctttactggtaccggcagatcctgggacagggcccggagcttctggttcaatttcaggatgagagtgtagtagatgattcacagttgcctaaggatcgattttctgcagagaggctcaaaggagtagactccactctcaagatccagcctgcagagcttggggactcggccatgtatctctgtgccagcagtgaactgtggaagagtgtcgtcgacatcagccccagcattttggtgatgggactcgactctccatcctaggtaagttgcagaatcagggtggtatggccattgtcccttgaaggcagagttctctactgtggaagagtgtcctgatggcgcgagggaggc

SEQ ID NO: 3656 - DNA, 495 bp, Artificial Sequence
  source: /note="Description of Artificial Sequence: Synthetic polynucleotide"
gccttgccagcccgctcagactgtggagttccgaacccaacagaactctcagaagctgaagttgcccagtcccccagatataagattacagagaaaagccaggctgtggctttttggtgtgatcctatttctggccatgctaccctttactggtaccggcagatcctgggacagggcccggagcttctggttcaatttcaggatgagagtgtagtagatgattcacagttgcctaaggatcgattttctgcagagaggctcaaaggagtagactccactctcaagatccagcctgcagagcttggggactcggccatgtatctctgtgccagcagtgaactgtggagttccgaagtcgacataattcacccctccactttgggaacgggaccaggctcactgtgacaggtatgggggctccactcttgactcgggggtgcctgggtttgactgcaatgatactgtggagttccgaactgatggcgcgagggaggc

SEQ ID NO: 3657 - DNA, 495 bp, Artificial Sequence
  source: /note="Description of Artificial Sequence: Synthetic polynucleotide"
gccttgccagcccgctcagactgtggacgttacttcccaacagaactctcagaagctgaagttgcccagtcccccagatataagattacagagaaaagccaggctgtggctttttggtgtgatcctatttctggccatgctaccctttactggtaccggcagatcctgggacagggcccggagcttctggttcaatttcaggatgagagtgtagtagatgattcacagttgcctaaggatcgattttctgcagagaggctcaaaggagtagactccactctcaagatccagcctgcagagcttggggactcggccatgtatctctgtgccagcagtgaactgtggacgttacttgtcgacacaatgagcagttcttcgggccagggacacggctcaccgtgctaggtaagaagggggctccaggtgggagagagggtgagcagcccagcctgcacgacccactgtggacgttacttctgatggcgcgagggaggc

SEQ ID NO: 3658 - DNA, 495 bp, Artificial Sequence
  source: /note="Description of Artificial Sequence: Synthetic polynucleotide"
gccttgccagcccgctcagactgtggataggagaccccaacagaactctcagaagctgaagttgcccagtcccccagatataagattacagagaaaagccaggctgtggctttttggtgtgatcctatttctggccatgctaccctttactggtaccggcagatcctgggacagggcccggagcttctggttcaatttcaggatgagagtgtagtagatgattcacagttgcctaaggatcgattttctgcagagaggctcaaaggagtagactccactctcaagatccagcctgcagagcttggggactcggccatgtatctctgtgccagcagtgaactgtggataggagacgtcgacaccggggagctgttttttggagaaggctctaggctgaccgtactgggtaaggaggcggttggggctccggagagctccgagagggcgggatgggcagaggactgtggataggagacctgatggcgcgagggaggc

SEQ ID NO: 3659 - DNA, 495 bp, Artificial Sequence
  source: /note="Description of Artificial Sequence: Synthetic polynucleotide"
gccttgccagcccgctcagactgtggagtgtctaccccaacagaactctcagaagctgaagttgcccagtcccccagatataagattacagagaaaagccaggctgtggctttttggtgtgatcctatttctggccatgctaccctttactggtaccggcagatcctgggacagggcccggagcttctggttcaatttcaggatgagagtgtagtagatgattcacagttgcctaaggatcgattttctgcagagaggctcaaaggagtagactccactctcaagatccagcctgcagagcttggggactcggccatgtatctctgtgccagcagtgaactgtggagtgtctacgtcgacagatacgcagtattttggcccaggcacccggctgacagtgctcggtaagcgggggctcccgctgaagccccggaactggggagggggcgccccgggacgcactgtggagtgtctacctgatggcgcgagggaggc

SEQ ID NO: 3660 - DNA, 495 bp, Artificial Sequence
  source: /note="Description of Artificial Sequence: Synthetic polynucleotide"
gccttgccagcccgctcagactgtggagtacagtgcccaacagaactctcagaagctgaagttgcccagtcccccagatataagattacagagaaaagccaggctgtggctttttggtgtgatcctatttctggccatgctaccctttactggtaccggcagatcctgggacagggcccggagcttctggttcaatttcaggatgagagtgtagtagatgattcacagttgcctaaggatcgattttctgcagagaggctcaaaggagtagactccactctcaagatccagcctgcagagcttggggactcggccatgtatctctgtgccagcagtgaactgtggagtacagtggtcgacaaaacattcagtacttcggcgccgggacccggctctcagtgctgggtaagctggggccgccgggggaccggggacgagactgcgctcgggtttttgtgcgactgtggagtacagtgctgatggcgcgagggaggc

SEQ ID NO: 3661 - DNA, 495 bp, Artificial Sequence
  source: /note="Description of Artificial Sequence: Synthetic polynucleotide"
gccttgccagcccgctcagactgtggaggatcatccccaacagaactctcagaagctgaagttgcccagtcccccagatataagattacagagaaaagccaggctgtggctttttggtgtgatcctatttctggccatgctaccctttactggtaccggcagatcctgggacagggcccggagcttctggttcaatttcaggatgagagtgtagtagatgattcacagttgcctaaggatcgattttctgcagagaggctcaaaggagtagactccactctcaagatccagcctgcagagcttggggactcggccatgtatctctgtgccagcagtgaactgtggaggatcatcgtcgacgagacccagtacttcgggccaggcacgcggctcctggtgctcggtgagcgcgggctgctggggcgcgggcgcgggcggcttgggtctggtttttgcggggactgtggaggatcatcctgatggcgcgagggaggc

SEQ ID NO: 3662 - DNA, 495 bp, Artificial Sequence
  source: /note="Description of Artificial Sequence: Synthetic polynucleotide"
gccttgccagcccgctcagactgtggatattggcgcccaacagaactctcagaagctgaagttgcccagtcccccagatataagattacagagaaaagccaggctgtggctttttggtgtgatcctatttctggccatgctaccctttactggtaccggcagatcctgggacagggcccggagcttctggttcaatttcaggatgagagtgtagtagatgattcacagttgcctaaggatcgattttctgcagagaggctcaaaggagtagactccactctcaagatccagcctgcagagcttggggactcggccatgtatctctgtgccagcagtgaactgtggatattggcggtcgacgggccaacgtcctgactttcggggccggcagcaggctgaccgtgctgggtgagttttcgcgggaccacccgggcggcgggattcaggtggaaggcggcggactgtggatattggcgctgatggcgcgagggaggc

SEQ ID NO: 3663 - DNA, 495 bp, Artificial Sequence
  source: /note="Description of Artificial Sequence: Synthetic polynucleotide"
gccttgccagcccgctcagactgtggaaggcttgacccaacagaactctcagaagctgaagttgcccagtcccccagatataagattacagagaaaagccaggctgtggctttttggtgtgatcctatttctggccatgctaccctttactggtaccggcagatcctgggacagggcccggagcttctggttcaatttcaggatgagagtgtagtagatgattcacagttgcctaaggatcgattttctgcagagaggctcaaaggagtagactccactctcaagatccagcctgcagagcttggggactcggccatgtatctctgtgccagcagtgaactgtggaaggcttgagtcgacacgagcagtacttcgggccgggcaccaggctcacggtcacaggtgagattcgggcgtctccccaccttccagcccctcggtccccggagtcggagggtggactgtggaaggcttgactgatggcgcgagggaggc

SEQ ID NO: 3664 - DNA, 495 bp, Artificial Sequence
  source: /note="Description of Artificial Sequence: Synthetic polynucleotide"
gccttgccagcccgctcagggtgtcatgacactctcttctcagaactcacagaagctggagttgcccagtctcccagatataagattatagagaaaaggcagagtgtggctttttggtgcaatcctatatctggccatgctaccctttactggtaccagcagatcctgggacagggcccaaagcttctgattcagtttcagaataacggtgtagtggatgattcacagttgcctaaggatcgattttctgcagagaggctcaaaggagtagactccactctcaagatccagcctgcaaagcttgaggactcggccgtgtatctctgtgccagcagtgaggtgtcatgacactctgtcgacactgaagctttctttggacaaggcaccagactcacagttgtaggtaagacatttttcaggttcttttgcagatccgtcacagggaaaagtgggtccacagggtgtcatgacactctctgatggcgcgagggaggc

SEQ ID NO: 3665 - DNA, 495 bp, Artificial Sequence
  source: /note="Description of Artificial Sequence: Synthetic polynucleotide"
gccttgccagcccgctcagggtgtcatttcggaaccttctcagaactcacagaagctggagttgcccagtctcccagatataagattatagagaaaaggcagagtgtggctttttggtgcaatcctatatctggccatgctaccctttactggtaccagcagatcctgggacagggcccaaagcttctgattcagtttcagaataacggtgtagtggatgattcacagttgcctaaggatcgattttctgcagagaggctcaaaggagtagactccactctcaagatccagcctgcaaagcttgaggactcggccgtgtatctctgtgccagcagtgaggtgtcatttcggaacgtcgactatggctacaccttcggttcggggaccaggttaaccgttgtaggtaaggctgggggtctctaggaggggtgcgatgagggaggactctgtcctgggaaatggtgtcatttcggaacctgatggcgcgagggaggc

SEQ ID NO: 3666 - DNA, 495 bp, Artificial Sequence
  source: /note="Description of Artificial Sequence: Synthetic polynucleotide"
gccttgccagcccgctcagggtgtcataagtaacgcttctcagaactcacagaagctggagttgcccagtctcccagatataagattatagagaaaaggcagagtgtggctttttggtgcaatcctatatctggccatgctaccctttactggtaccagcagatcctgggacagggcccaaagcttctgattcagtttcagaataacggtgtagtggatgattcacagttgcctaaggatcgattttctgcagagaggctcaaaggagtagactccactctcaagatccagcctgcaaagcttgaggactcggccgtgtatctctgtgccagcagtgaggtgtcataagtaacggtcgacgaaacaccatatattttggagagggaagttggctcactgttgtaggtgagtaagtcaaggctggacagctgggaacttgcaaaaaggggctggaatccagggtgtcataagtaacgctgatggcgcgagggaggc

SEQ ID NO: 3667 - DNA, 495 bp, Artificial Sequence
  source: /note="Description of Artificial Sequence: Synthetic polynucleotide"
gccttgccagcccgctcagggtgtcatgtctcctacttctcagaactcacagaagctggagttgcccagtctcccagatataagattatagagaaaaggcagagtgtggctttttggtgcaatcctatatctggccatgctaccctttactggtaccagcagatcctgggacagggcccaaagcttctgattcagtttcagaataacggtgtagtggatgattcacagttgcctaaggatcgattttctgcagagaggctcaaaggagtagactccactctcaagatccagcctgcaaagcttgaggactcggccgtgtatctctgtgccagcagtgaggtgtcatgtctcctagtcgacaatgaaaaactgttttttggcagtggaacccagctctctgtcttgggtatgtaaaagacttctttcgggatagtgtatcataaggtcggagttccaggagggtgtcatgtctcctactgatggcgcgagggaggc

SEQ ID NO: 3668 - DNA, 495 bp, Artificial Sequence
  source: /note="Description of Artificial Sequence: Synthetic polynucleotide"
gccttgccagcccgctcagggtgtcatagagtgtccttctcagaactcacagaagctggagttgcccagtctcccagatataagattatagagaaaaggcagagtgtggctttttggtgcaatcctatatctggccatgctaccctttactggtaccagcagatcctgggacagggcccaaagcttctgattcagtttcagaataacggtgtagtggatgattcacagttgcctaaggatcgattttctgcagagaggctcaaaggagtagactccactctcaagatccagcctgcaaagcttgaggactcggccgtgtatctctgtgccagcagtgaggtgtcatagagtgtcgtcgacatcagccccagcattttggtgatgggactcgactctccatcctaggtaagttgcagaatcagggtggtatggccattgtcccttgaaggcagagttctctggtgtcatagagtgtcctgatggcgcgagggaggc

SEQ ID NO: 3669 - DNA, 495 bp, Artificial Sequence
  source: /note="Description of Artificial Sequence: Synthetic polynucleotide"
gccttgccagcccgctcagggtgtcatgttccgaacttctcagaactcacagaagctggagttgcccagtctcccagatataagattatagagaaaaggcagagtgtggctttttggtgcaatcctatatctggccatgctaccctttactggtaccagcagatcctgggacagggcccaaagcttctgattcagtttcagaataacggtgtagtggatgattcacagttgcctaaggatcgattttctgcagagaggctcaaaggagtagactccactctcaagatccagcctgcaaagcttgaggactcggccgtgtatctctgtgccagcagtgaggtgtcatgttccgaagtcgacataattcacccctccactttgggaacgggaccaggctcactgtgacaggtatgggggctccactcttgactcgggggtgcctgggtttgactgcaatgatggtgtcatgttccgaactgatggcgcgagggaggc

SEQ ID NO: 3670 - DNA, 495 bp, Artificial Sequence
  source: /note="Description of Artificial Sequence: Synthetic polynucleotide"
gccttgccagcccgctcagggtgtcatcgttacttcttctcagaactcacagaagctggagttgcccagtctcccagatataagattatagagaaaaggcagagtgtggctttttggtgcaatcctatatctggccatgctaccctttactggtaccagcagatcctgggacagggcccaaagcttctgattcagtttcagaataacggtgtagtggatgattcacagttgcctaaggatcgattttctgcagagaggctcaaaggagtagactccactctcaagatccagcctgcaaagcttgaggactcggccgtgtatctctgtgccagcagtgaggtgtcatcgttacttgtcgacacaatgagcagttcttcgggccagggacacggctcaccgtgctaggtaagaagggggctccaggtgggagagagggtgagcagcccagcctgcacgacccggtgtcatcgttacttctgatggcgcgagggaggc

SEQ ID NO: 3671 - DNA, 495 bp, Artificial Sequence
  source: /note="Description of Artificial Sequence: Synthetic polynucleotide"
gccttgccagcccgctcagggtgtcattaggagaccttctcagaactcacagaagctggagttgcccagtctcccagatataagattatagagaaaaggcagagtgtggctttttggtgcaatcctatatctggccatgctaccctttactggtaccagcagatcctgggacagggcccaaagcttctgattcagtttcagaataacggtgtagtggatgattcacagttgcctaaggatcgattttctgcagagaggctcaaaggagtagactccactctcaagatccagcctgcaaagcttgaggactcggccgtgtatctctgtgccagcagtgaggtgtcattaggagacgtcgacaccggggagctgttttttggagaaggctctaggctgaccgtactgggtaaggaggcggttggggctccggagagctccgagagggcgggatgggcagaggggtgtcattaggagacctgatggcgcgagggaggc

SEQ ID NO: 3672 - DNA, 495 bp, Artificial Sequence
  source: /note="Description of Artificial Sequence: Synthetic polynucleotide"
gccttgccagcccgctcagggtgtcatgtgtctaccttctcagaactcacagaagctggagttgcccagtctcccagatataagattatagagaaaaggcagagtgtggctttttggtgcaatcctatatctggccatgctaccctttactggtaccagcagatcctgggacagggcccaaagcttctgattcagtttcagaataacggtgtagtggatgattcacagttgcctaaggatcgattttctgcagagaggctcaaaggagtagactccactctcaagatccagcctgcaaagcttgaggactcggccgtgtatctctgtgccagcagtgaggtgtcatgtgtctacgtcgacagatacgcagtattttggcccaggcacccggctgacagtgctcggtaagcgggggctcccgctgaagccccggaactggggagggggcgccccgggacgcggtgtcatgtgtctacctgatggcgcgagggaggc

SEQ ID NO: 3673 - DNA, 495 bp, Artificial Sequence
  source: /note="Description of Artificial Sequence: Synthetic polynucleotide"
gccttgccagcccgctcagggtgtcatgtacagtgcttctcagaactcacagaagctggagttgcccagtctcccagatataagattatagagaaaaggcagagtgtggctttttggtgcaatcctatatctggccatgctaccctttactggtaccagcagatcctgggacagggcccaaagcttctgattcagtttcagaataacggtgtagtggatgattcacagttgcctaaggatcgattttctgcagagaggctcaaaggagtagactccactctcaagatccagcctgcaaagcttgaggactcggccgtgtatctctgtgccagcagtgaggtgtcatgtacagtggtcgacaaaacattcagtacttcggcgccgggacccggctctcagtgctgggtaagctggggccgccgggggaccggggacgagactgcgctcgggtttttgtgcgggtgtcatgtacagtgctgatggcgcgagggaggc

SEQ ID NO: 3674 - DNA, 495 bp, Artificial Sequence
  source: /note="Description of Artificial Sequence: Synthetic polynucleotide"
gccttgccagcccgctcagggtgtcatggatcatccttctcagaactcacagaagctggagttgcccagtctcccagatataagattatagagaaaaggcagagtgtggctttttggtgcaatcctatatctggccatgctaccctttactggtaccagcagatcctgggacagggcccaaagcttctgattcagtttcagaataacggtgtagtggatgattcacagttgcctaaggatcgattttctgcagagaggctcaaaggagtagactccactctcaagatccagcctgcaaagcttgaggactcggccgtgtatctctgtgccagcagtgaggtgtcatggatcatcgtcgacgagacccagtacttcgggccaggcacgcggctcctggtgctcggtgagcgcgggctgctggggcgcgggcgcgggcggcttgggtctggtttttgcggggggtgtcatggatcatcctgatggcgcgagggaggc

SEQ ID NO: 3675 - DNA, 495 bp, Artificial Sequence
  source: /note="Description of Artificial Sequence: Synthetic polynucleotide"
gccttgccagcccgctcagggtgtcattattggcgcttctcagaactcacagaagctggagttgcccagtctcccagatataagattatagagaaaaggcagagtgtggctttttggtgcaatcctatatctggccatgctaccctttactggtaccagcagatcctgggacagggcccaaagcttctgattcagtttcagaataacggtgtagtggatgattcacagttgcctaaggatcgattttctgcagagaggctcaaaggagtagactccactctcaagatccagcctgcaaagcttgaggactcggccgtgtatctctgtgccagcagtgaggtgtcattattggcggtcgacgggccaacgtcctgactttcggggccggcagcaggctgaccgtgctgggtgagttttcgcgggaccacccgggcggcgggattcaggtggaaggcggcggggtgtcattattggcgctgatggcgcgagggaggc

SEQ ID NO: 3676 - DNA, 495 bp, Artificial Sequence
  source: /note="Description of Artificial Sequence: Synthetic polynucleotide"
gccttgccagcccgctcagggtgtcataggcttgacttctcagaactcacagaagctggagttgcccagtctcccagatataagattatagagaaaaggcagagtgtggctttttggtgcaatcctatatctggccatgctaccctttactggtaccagcagatcctgggacagggcccaaagcttctgattcagtttcagaataacggtgtagtggatgattcacagttgcctaaggatcgattttctgcagagaggctcaaaggagtagactccactctcaagatccagcctgcaaagcttgaggactcggccgtgtatctctgtgccagcagtgaggtgtcataggcttgagtcgacacgagcagtacttcgggccgggcaccaggctcacggtcacaggtgagattcgggcgtctccccaccttccagcccctcggtccccggagtcggagggtggggtgtcataggcttgactgatggcgcgagggaggc

SEQ ID NO: 3677 - DNA, 495 bp, Artificial Sequence
  source: /note="Description of Artificial Sequence: Synthetic polynucleotide"
gccttgccagcccgctcagtcgtgaaggacactctccccacagaactcatagaagctggagtggttcagtctcccagatataagattatagagaaaaaacagcctgtggctttttggtgcaatcctatttctggccacaataccctttactggtacctgcagaacttgggacagggcccggagcttctgattcgatatgagaatgaggaagcagtagacgattcacagttgcctaaggatcgattttctgcagagaggctcaaaggagtagactccactctcaagatccagcctgcagagcttggggactcggccgtgtatctctgtgccagcagtgatcgtgaaggacactctgtcgacactgaagctttctttggacaaggcaccagactcacagttgtaggtaagacatttttcaggttcttttgcagatccgtcacagggaaaagtgggtccacagtcgtgaaggacactctctgatggcgcgagggaggc

SEQ ID NO: 3678 - DNA, 495 bp, Artificial Sequence
  source: /note="Description of Artificial Sequence: Synthetic polynucleotide"
gccttgccagcccgctcagtcgtgaagttcggaacccccacagaactcatagaagctggagtggttcagtctcccagatataagattatagagaaaaaacagcctgtggctttttggtgcaatcctatttctggccacaataccctttactggtacctgcagaacttgggacagggcccggagcttctgattcgatatgagaatgaggaagcagtagacgattcacagttgcctaaggatcgattttctgcagagaggctcaaaggagtagactccactctcaagatccagcctgcagagcttggggactcggccgtgtatctctgtgccagcagtgatcgtgaagttcggaacgtcgactatggctacaccttcggttcggggaccaggttaaccgttgtaggtaaggctgggggtctctaggaggggtgcgatgagggaggactctgtcctgggaaattcgtgaagttcggaacctgatggcgcgagggaggc

SEQ ID NO: 3679 - DNA, 495 bp, Artificial Sequence
  source: /note="Description of Artificial Sequence: Synthetic polynucleotide"
gccttgccagcccgctcagtcgtgaagaagtaacgccccacagaactcatagaagctggagtggttcagtctcccagatataagattatagagaaaaaacagcctgtggctttttggtgcaatcctatttctggccacaataccctttactggtacctgcagaacttgggacagggcccggagcttctgattcgatatgagaatgaggaagcagtagacgattcacagttgcctaaggatcgattttctgcagagaggctcaaaggagtagactccactctcaagatccagcctgcagagcttggggactcggccgtgtatctctgtgccagcagtgatcgtgaagaagtaacggtcgacgaaacaccatatattttggagagggaagttggctcactgttgtaggtgagtaagtcaaggctggacagctgggaacttgcaaaaaggggctggaatccagtcgtgaagaagtaacgctgatggcgcgagggaggc

SEQ ID NO: 3680 - DNA, 495 bp, Artificial Sequence
  source: /note="Description of Artificial Sequence: Synthetic polynucleotide"
gccttgccagcccgctcagtcgtgaaggtctcctaccccacagaactcatagaagctggagtggttcagtctcccagatataagattatagagaaaaaacagcctgtggctttttggtgcaatcctatttctggccacaataccctttactggtacctgcagaacttgggacagggcccggagcttctgattcgatatgagaatgaggaagcagtagacgattcacagttgcctaaggatcgattttctgcagagaggctcaaaggagtagactccactctcaagatccagcctgcagagcttggggactcggccgtgtatctctgtgccagcagtgatcgtgaaggtctcctagtcgacaatgaaaaactgttttttggcagtggaacccagctctctgtcttgggtatgtaaaagacttctttcgggatagtgtatcataaggtcggagttccaggagtcgtgaaggtctcctactgatggcgcgagggaggc

SEQ ID NO: 3681 - DNA, 495 bp, Artificial Sequence
  source: /note="Description of Artificial Sequence: Synthetic polynucleotide"
gccttgccagcccgctcagtcgtgaagagagtgtcccccacagaactcatagaagctggagtggttcagtctcccagatataagattatagagaaaaaacagcctgtggctttttggtgcaatcctatttctggccacaataccctttactggtacctgcagaacttgggacagggcccggagcttctgattcgatatgagaatgaggaagcagtagacgattcacagttgcctaaggatcgattttctgcagagaggctcaaaggagtagactccactctcaagatccagcctgcagagcttggggactcggccgtgtatctctgtgccagcagtgatcgtgaagagagtgtcgtcgacatcagccccagcattttggtgatgggactcgactctccatcctaggtaagttgcagaatcagggtggtatggccattgtcccttgaaggcagagttctcttcgtgaagagagtgtcctgatggcgcgagggaggc

SEQ ID NO: 3682 - DNA, 495 bp, Artificial Sequence
  source: /note="Description of Artificial Sequence: Synthetic polynucleotide"
gccttgccagcccgctcagtcgtgaaggttccgaaccccacagaactcatagaagctggagtggttcagtctcccagatataagattatagagaaaaaacagcctgtggctttttggtgcaatcctatttctggccacaataccctttactggtacctgcagaacttgggacagggcccggagcttctgattcgatatgagaatgaggaagcagtagacgattcacagttgcctaaggatcgattttctgcagagaggctcaaaggagtagactccactctcaagatccagcctgcagagcttggggactcggccgtgtatctctgtgccagcagtgatcgtgaaggttccgaagtcgacataattcacccctccactttgggaacgggaccaggctcactgtgacaggtatgggggctccactcttgactcgggggtgcctgggtttgactgcaatgattcgtgaaggttccgaactgatggcgcgagggaggc

SEQ ID NO: 3683 - DNA, 495 bp, Artificial Sequence
  source: /note="Description of Artificial Sequence: Synthetic polynucleotide"
gccttgccagcccgctcagtcgtgaagcgttacttccccacagaactcatagaagctggagtggttcagtctcccagatataagattatagagaaaaaacagcctgtggctttttggtgcaatcctatttctggccacaataccctttactggtacctgcagaacttgggacagggcccggagcttctgattcgatatgagaatgaggaagcagtagacgattcacagttgcctaaggatcgattttctgcagagaggctcaaaggagtagactccactctcaagatccagcctgcagagcttggggactcggccgtgtatctctgtgccagcagtgatcgtgaagcgttacttgtcgacacaatgagcagttcttcgggccagggacacggctcaccgtgctaggtaagaagggggctccaggtgggagagagggtgagcagcccagcctgcacgaccctcgtgaagcgttacttctgatggcgcgagggaggc

SEQ ID NO: 3684 - DNA, 495 bp, Artificial Sequence
  source: /note="Description of Artificial Sequence: Synthetic polynucleotide"
gccttgccagcccgctcagtcgtgaagtaggagacccccacagaactcatagaagctggagtggttcagtctcccagatataagattatagagaaaaaacagcctgtggctttttggtgcaatcctatttctggccacaataccctttactggtacctgcagaacttgggacagggcccggagcttctgattcgatatgagaatgaggaagcagtagacgattcacagttgcctaaggatcgattttctgcagagaggctcaaaggagtagactccactctcaagatccagcctgcagagcttggggactcggccgtgtatctctgtgccagcagtgatcgtgaagtaggagacgtcgacaccggggagctgttttttggagaaggctctaggctgaccgtactgggtaaggaggcggttggggctccggagagctccgagagggcgggatgggcagaggtcgtgaagtaggagacctgatggcgcgagggaggc

SEQ ID NO: 3685 - DNA, 495 bp, Artificial Sequence
  source: /note="Description of Artificial Sequence: Synthetic polynucleotide"
gccttgccagcccgctcagtcgtgaaggtgtctacccccacagaactcatagaagctggagtggttcagtctcccagatataagattatagagaaaaaacagcctgtggctttttggtgcaatcctatttctggccacaataccctttactggtacctgcagaacttgggacagggcccggagcttctgattcgatatgagaatgaggaagcagtagacgattcacagttgcctaaggatcgattttctgcagagaggctcaaaggagtagactccactctcaagatccagcctgcagagcttggggactcggccgtgtatctctgtgccagcagtgatcgtgaaggtgtctacgtcgacagatacgcagtattttggcccaggcacccggctgacagtgctcggtaagcgggggctcccgctgaagccccggaactggggagggggcgccccgggacgctcgtgaaggtgtctacctgatggcgcgagggaggc

SEQ ID NO: 3686 - DNA, 495 bp, Artificial Sequence
  source: /note="Description of Artificial Sequence: Synthetic polynucleotide"
gccttgccagcccgctcagtcgtgaaggtacagtgccccacagaactcatagaagctggagtggttcagtctcccagatataagattatagagaaaaaacagcctgtggctttttggtgcaatcctatttctggccacaataccctttactggtacctgcagaacttgggacagggcccggagcttctgattcgatatgagaatgaggaagcagtagacgattcacagttgcctaaggatcgattttctgcagagaggctcaaaggagtagactccactctcaagatccagcctgcagagcttggggactcggccgtgtatctctgtgccagcagtgatcgtgaaggtacagtggtcgacaaaacattcagtacttcggcgccgggacccggctctcagtgctgggtaagctggggccgccgggggaccggggacgagactgcgctcgggtttttgtgcgtcgtgaaggtacagtgctgatggcgcgagggaggc

SEQ ID NO: 3687 - DNA, 495 bp, Artificial Sequence
  source: /note="Description of Artificial Sequence: Synthetic polynucleotide"
gccttgccagcccgctcagtcgtgaagggatcatcccccacagaactcatagaagctggagtggttcagtctcccagatataagattatagagaaaaaacagcctgtggctttttggtgcaatcctatttctggccacaataccctttactggtacctgcagaacttgggacagggcccggagcttctgattcgatatgagaatgaggaagcagtagacgattcacagttgcctaaggatcgattttctgcagagaggctcaaaggagtagactccactctcaagatccagcctgcagagcttggggactcggccgtgtatctctgtgccagcagtgatcgtgaagggatcatcgtcgacgagacccagtacttcgggccaggcacgcggctcctggtgctcggtgagcgcgggctgctggggcgcgggcgcgggcggcttgggtctggtttttgcggggtcgtgaagggatcatcctgatggcgcgagggaggc

SEQ ID NO: 3688 - DNA, 495 bp, Artificial Sequence
  source: /note="Description of Artificial Sequence: Synthetic polynucleotide"
gccttgccagcccgctcagtcgtgaagtattggcgccccacagaactcatagaagctggagtggttcagtctcccagatataagattatagagaaaaaacagcctgtggctttttggtgcaatcctatttctggccacaataccctttactggtacctgcagaacttgggacagggcccggagcttctgattcgatatgagaatgaggaagcagtagacgattcacagttgcctaaggatcgattttctgcagagaggctcaaaggagtagactccactctcaagatccagcctgcagagcttggggactcggccgtgtatctctgtgccagcagtgatcgtgaagtattggcggtcgacgggccaacgtcctgactttcggggccggcagcaggctgaccgtgctgggtgagttttcgcgggaccacccgggcggcgggattcaggtggaaggcggcggtcgtgaagtattggcgctgatggcgcgagggaggc

SEQ ID NO: 3689 - DNA, 495 bp, Artificial Sequence
  source: /note="Description of Artificial Sequence: Synthetic polynucleotide"
gccttgccagcccgctcagtcgtgaagaggcttgaccccacagaactcatagaagctggagtggttcagtctcccagatataagattatagagaaaaaacagcctgtggctttttggtgcaatcctatttctggccacaataccctttactggtacctgcagaacttgggacagggcccggagcttctgattcgatatgagaatgaggaagcagtagacgattcacagttgcctaaggatcgattttctgcagagaggctcaaaggagtagactccactctcaagatccagcctgcagagcttggggactcggccgtgtatctctgtgccagcagtgatcgtgaagaggcttgagtcgacacgagcagtacttcgggccgggcaccaggctcacggtcacaggtgagattcgggcgtctccccaccttccagcccctcggtccccggagtcggagggtggtcgtgaagaggcttgactgatggcgcgagggaggc

SEQ ID NO: 3690 - DNA, 495 bp, Artificial Sequence
  source: /note="Description of Artificial Sequence: Synthetic polynucleotide"
gccttgccagcccgctcagcactagctgacactctttttatagcacacacagatgctggtgttatccagtcacccaggcacaaagtgacagagatgggacaatcagtaactctgagatgcgaaccaatttcaggccacaatgatcttctctggtacagacagacctttgtgcagggactggaattgctgaattacttctgcagctggaccctcgtagatgactcaggagtgtccaaggattgattctcagcacagatgcctgatgtatcattctccactctgaggatccagcccatggaacccagggacttgggcctatatttctgtgccagcagtgacactagctgacactctgtcgacactgaagctttctttggacaaggcaccagactcacagttgtaggtaagacatttttcaggttcttttgcagatccgtcacagggaaaagtgggtccacagcactagctgacactctctgatggcgcgagggaggc

SEQ ID NO: 3691 - DNA, 495 bp, Artificial Sequence
  source: /note="Description of Artificial Sequence: Synthetic polynucleotide"
gccttgccagcccgctcagcactagctttcggaacttttatagcacacacagatgctggtgttatccagtcacccaggcacaaagtgacagagatgggacaatcagtaactctgagatgcgaaccaatttcaggccacaatgatcttctctggtacagacagacctttgtgcagggactggaattgctgaattacttctgcagctggaccctcgtagatgactcaggagtgtccaaggattgattctcagcacagatgcctgatgtatcattctccactctgaggatccagcccatggaacccagggacttgggcctatatttctgtgccagcagtgacactagctttcggaacgtcgactatggctacaccttcggttcggggaccaggttaaccgttgtaggtaaggctgggggtctctaggaggggtgcgatgagggaggactctgtcctgggaaatcactagctttcggaacctgatggcgcgagggaggc

SEQ ID NO: 3692 - DNA, 495 bp, Artificial Sequence
  source: /note="Description of Artificial Sequence: Synthetic polynucleotide"
gccttgccagcccgctcagcactagctaagtaacgttttatagcacacacagatgctggtgttatccagtcacccaggcacaaagtgacagagatgggacaatcagtaactctgagatgcgaaccaatttcaggccacaatgatcttctctggtacagacagacctttgtgcagggactggaattgctgaattacttctgcagctggaccctcgtagatgactcaggagtgtccaaggattgattctcagcacagatgcctgatgtatcattctccactctgaggatccagcccatggaacccagggacttgggcctatatttctgtgccagcagtgacactagctaagtaacggtcgacgaaacaccatatattttggagagggaagttggctcactgttgtaggtgagtaagtcaaggctggacagctgggaacttgcaaaaaggggctggaatccagcactagctaagtaacgctgatggcgcgagggaggc

SEQ ID NO: 3693 - DNA, 495 bp, Artificial Sequence
  source: /note="Description of Artificial Sequence: Synthetic polynucleotide"
gccttgccagcccgctcagcactagctgtctcctattttatagcacacacagatgctggtgttatccagtcacccaggcacaaagtgacagagatgggacaatcagtaactctgagatgcgaaccaatttcaggccacaatgatcttctctggtacagacagacctttgtgcagggactggaattgctgaattacttctgcagctggaccctcgtagatgactcaggagtgtccaaggattgattctcagcacagatgcctgatgtatcattctccactctgaggatccagcccatggaacccagggacttgggcctatatttctgtgccagcagtgacactagctgtctcctagtcgacaatgaaaaactgttttttggcagtggaacccagctctctgtcttgggtatgtaaaagacttctttcgggatagtgtatcataaggtcggagttccaggagcactagctgtctcctactgatggcgcgagggaggc

SEQ ID NO: 3694 - DNA, 495 bp, Artificial Sequence
  source: /note="Description of Artificial Sequence: Synthetic polynucleotide"
gccttgccagcccgctcagcactagctagagtgtcttttatagcacacacagatgctggtgttatccagtcacccaggcacaaagtgacagagatgggacaatcagtaactctgagatgcgaaccaatttcaggccacaatgatcttctctggtacagacagacctttgtgcagggactggaattgctgaattacttctgcagctggaccctcgtagatgactcaggagtgtccaaggattgattctcagcacagatgcctgatgtatcattctccactctgaggatccagcccatggaacccagggacttgggcctatatttctgtgccagcagtgacactagctagagtgtcgtcgacatcagccccagcattttggtgatgggactcgactctccatcctaggtaagttgcagaatcagggtggtatggccattgtcccttgaaggcagagttctctcactagctagagtgtcctgatggcgcgagggaggc

SEQ ID NO: 3695 - DNA, 495 bp, Artificial Sequence
  source: /note="Description of Artificial Sequence: Synthetic polynucleotide"
gccttgccagcccgctcagcactagctgttccgaattttatagcacacacagatgctggtgttatccagtcacccaggcacaaagtgacagagatgggacaatcagtaactctgagatgcgaaccaatttcaggccacaatgatcttctctggtacagacagacctttgtgcagggactggaattgctgaattacttctgcagctggaccctcgtagatgactcaggagtgtccaaggattgattctcagcacagatgcctgatgtatcattctccactctgaggatccagcccatggaacccagggacttgggcctatatttctgtgccagcagtgacactagctgttccgaagtcgacataattcacccctccactttgggaacgggaccaggctcactgtgacaggtatgggggctccactcttgactcgggggtgcctgggtttgactgcaatgatcactagctgttccgaactgatggcgcgagggaggc

SEQ ID NO: 3696 - DNA, 495 bp, Artificial Sequence
  source: /note="Description of Artificial Sequence: Synthetic polynucleotide"
gccttgccagcccgctcagcactagctcgttacttttttatagcacacacagatgctggtgttatccagtcacccaggcacaaagtgacagagatgggacaatcagtaactctgagatgcgaaccaatttcaggccacaatgatcttctctggtacagacagacctttgtgcagggactggaattgctgaattacttctgcagctggaccctcgtagatgactcaggagtgtccaaggattgattctcagcacagatgcctgatgtatcattctccactctgaggatccagcccatggaacccagggacttgggcctatatttctgtgccagcagtgacactagctcgttacttgtcgacacaatgagcagttcttcgggccagggacacggctcaccgtgctaggtaagaagggggctccaggtgggagagagggtgagcagcccagcctgcacgaccccactagctcgttacttctgatggcgcgagggaggc

SEQ ID NO: 3697 - DNA, 495 bp, Artificial Sequence
  source: /note="Description of Artificial Sequence: Synthetic polynucleotide"
gccttgccagcccgctcagcactagcttaggagacttttatagcacacacagatgctggtgttatccagtcacccaggcacaaagtgacagagatgggacaatcagtaactctgagatgcgaaccaatttcaggccacaatgatcttctctggtacagacagacctttgtgcagggactggaattgctgaattacttctgcagctggaccctcgtagatgactcaggagtgtccaaggattgattctcagcacagatgcctgatgtatcattctccactctgaggatccagcccatggaacccagggacttgggcctatatttctgtgccagcagtgacactagcttaggagacgtcgacaccggggagctgttttttggagaaggctctaggctgaccgtactgggtaaggaggcggttggggctccggagagctccgagagggcgggatgggcagaggcactagcttaggagacctgatggcgcgagggaggc

SEQ ID NO: 3698 - DNA, 495 bp, Artificial Sequence
  source: /note="Description of Artificial Sequence: Synthetic polynucleotide"
gccttgccagcccgctcagcactagctgtgtctacttttatagcacacacagatgctggtgttatccagtcacccaggcacaaagtgacagagatgggacaatcagtaactctgagatgcgaaccaatttcaggccacaatgatcttctctggtacagacagacctttgtgcagggactggaattgctgaattacttctgcagctggaccctcgtagatgactcaggagtgtccaaggattgattctcagcacagatgcctgatgtatcattctccactctgaggatccagcccatggaacccagggacttgggcctatatttctgtgccagcagtgacactagctgtgtctacgtcgacagatacgcagtattttggcccaggcacccggctgacagtgctcggtaagcgggggctcccgctgaagccccggaactggggagggggcgccccgggacgccactagctgtgtctacctgatggcgcgagggaggc

SEQ ID NO: 3699 - DNA, 495 bp, Artificial Sequence
  source: /note="Description of Artificial Sequence: Synthetic polynucleotide"
gccttgccagcccgctcagcactagctgtacagtgttttatagcacacacagatgctggtgttatccagtcacccaggcacaaagtgacagagatgggacaatcagtaactctgagatgcgaaccaatttcaggccacaatgatcttctctggtacagacagacctttgtgcagggactggaattgctgaattacttctgcagctggaccctcgtagatgactcaggagtgtccaaggattgattctcagcacagatgcctgatgtatcattctccactctgaggatccagcccatggaacccagggacttgggcctatatttctgtgccagcagtgacactagctgtacagtggtcgacaaaacattcagtacttcggcgccgggacccggctctcagtgctgggtaagctggggccgccgggggaccggggacgagactgcgctcgggtttttgtgcgcactagctgtacagtgctgatggcgcgagggaggc

SEQ ID NO: 3700 - DNA, 495 bp, Artificial Sequence
  source: /note="Description of Artificial Sequence: Synthetic polynucleotide"
gccttgccagcccgctcagcactagctggatcatcttttatagcacacacagatgctggtgttatccagtcacccaggcacaaagtgacagagatgggacaatcagtaactctgagatgcgaaccaatttcaggccacaatgatcttctctggtacagacagacctttgtgcagggactggaattgctgaattacttctgcagctggaccctcgtagatgactcaggagtgtccaaggattgattctcagcacagatgcctgatgtatcattctccactctgaggatccagcccatggaacccagggacttgggcctatatttctgtgccagcagtgacactagctggatcatcgtcgacgagacccagtacttcgggccaggcacgcggctcctggtgctcggtgagcgcgggctgctggggcgcgggcgcgggcggcttgggtctggtttttgcggggcactagctggatcatcctgatggcgcgagggaggc

SEQ ID NO: 3701 - DNA, 495 bp, Artificial Sequence
  source: /note="Description of Artificial Sequence: Synthetic polynucleotide"
gccttgccagcccgctcagcactagcttattggcgttttatagcacacacagatgctggtgttatccagtcacccaggcacaaagtgacagagatgggacaatcagtaactctgagatgcgaaccaatttcaggccacaatgatcttctctggtacagacagacctttgtgcagggactggaattgctgaattacttctgcagctggaccctcgtagatgactcaggagtgtccaaggattgattctcagcacagatgcctgatgtatcattctccactctgaggatccagcccatggaacccagggacttgggcctatatttctgtgccagcagtgacactagcttattggcggtcgacgggccaacgtcctgactttcggggccggcagcaggctgaccgtgctgggtgagttttcgcgggaccacccgggcggcgggattcaggtggaaggcggcggcactagcttattggcgctgatggcgcgagggaggc

SEQ ID NO: 3702 - DNA, 495 bp, Artificial Sequence
  source: /note="Description of Artificial Sequence: Synthetic polynucleotide"
gccttgccagcccgctcagcactagctaggcttgattttatagcacacacagatgctggtgttatccagtcacccaggcacaaagtgacagagatgggacaatcagtaactctgagatgcgaaccaatttcaggccacaatgatcttctctggtacagacagacctttgtgcagggactggaattgctgaattacttctgcagctggaccctcgtagatgactcaggagtgtccaaggattgattctcagcacagatgcctgatgtatcattctccactctgaggatccagcccatggaacccagggacttgggcctatatttctgtgccagcagtgacactagctaggcttgagtcgacacgagcagtacttcgggccgggcaccaggctcacggtcacaggtgagattcgggcgtctccccaccttccagcccctcggtccccggagtcggagggtggcactagctaggcttgactgatggcgcgagggaggc

SEQ ID NO: 3703 - DNA, 495 bp, Artificial Sequence
  source: /note="Description of Artificial Sequence: Synthetic polynucleotide"
gccttgccagcccgctcagcttggttagacactctttttatagcatgcacagatgctggcattatccagtcacccaagcatgaggtgacagaaatgggacaaacagtgactctgagatgtgagccaatttttggccacaatttccttttctggtacagagataccttcgtgcagggactggaattgctgagttacttccggagctgatctattatagataatgcaggtatgcccacagagcgattctcagctgagaggcctgatggatcattctctactctgaagatccagcctgcagagcagggggactcggccgtgtatgtctgtgcaagtcgtgacttggttagacactctgtcgacactgaagctttctttggacaaggcaccagactcacagttgtaggtaagacatttttcaggttcttttgcagatccgtcacagggaaaagtgggtccacagcttggttagacactctctgatggcgcgagggaggc

SEQ ID NO: 3704 - DNA, 495 bp, Artificial Sequence
  source: /note="Description of Artificial Sequence: Synthetic polynucleotide"
gccttgccagcccgctcagcttggttattcggaacttttatagcatgcacagatgctggcattatccagtcacccaagcatgaggtgacagaaatgggacaaacagtgactctgagatgtgagccaatttttggccacaatttccttttctggtacagagataccttcgtgcagggactggaattgctgagttacttccggagctgatctattatagataatgcaggtatgcccacagagcgattctcagctgagaggcctgatggatcattctctactctgaagatccagcctgcagagcagggggactcggccgtgtatgtctgtgcaagtcgtgacttggttattcggaacgtcgactatggctacaccttcggttcggggaccaggttaaccgttgtaggtaaggctgggggtctctaggaggggtgcgatgagggaggactctgtcctgggaaatcttggttattcggaacctgatggcgcgagggaggc

SEQ ID NO: 3705 - DNA, 495 bp, Artificial Sequence
  source: /note="Description of Artificial Sequence: Synthetic polynucleotide"
gccttgccagcccgctcagcttggttaaagtaacgttttatagcatgcacagatgctggcattatccagtcacccaagcatgaggtgacagaaatgggacaaacagtgactctgagatgtgagccaatttttggccacaatttccttttctggtacagagataccttcgtgcagggactggaattgctgagttacttccggagctgatctattatagataatgcaggtatgcccacagagcgattctcagctgagaggcctgatggatcattctctactctgaagatccagcctgcagagcagggggactcggccgtgtatgtctgtgcaagtcgtgacttggttaaagtaacggtcgacgaaacaccatatattttggagagggaagttggctcactgttgtaggtgagtaagtcaaggctggacagctgggaacttgcaaaaaggggctggaatccagcttggttaaagtaacgctgatggcgcgagggaggc

SEQ ID NO: 3706 - DNA, 495 bp, Artificial Sequence
  source: /note="Description of Artificial Sequence: Synthetic polynucleotide"
gccttgccagcccgctcagcttggttagtctcctattttatagcatgcacagatgctggcattatccagtcacccaagcatgaggtgacagaaatgggacaaacagtgactctgagatgtgagccaatttttggccacaatttccttttctggtacagagataccttcgtgcagggactggaattgctgagttacttccggagctgatctattatagataatgcaggtatgcccacagagcgattctcagctgagaggcctgatggatcattctctactctgaagatccagcctgcagagcagggggactcggccgtgtatgtctgtgcaagtcgtgacttggttagtctcctagtcgacaatgaaaaactgttttttggcagtggaacccagctctctgtcttgggtatgtaaaagacttctttcgggatagtgtatcataaggtcggagttccaggagcttggttagtctcctactgatggcgcgagggaggc

SEQ ID NO: 3707 - DNA, 495 bp, Artificial Sequence
  source: /note="Description of Artificial Sequence: Synthetic polynucleotide"
gccttgccagcccgctcagcttggttaagagtgtcttttatagcatgcacagatgctggcattatccagtcacccaagcatgaggtgacagaaatgggacaaacagtgactctgagatgtgagccaatttttggccacaatttccttttctggtacagagataccttcgtgcagggactggaattgctgagttacttccggagctgatctattatagataatgcaggtatgcccacagagcgattctcagctgagaggcctgatggatcattctctactctgaagatccagcctgcagagcagggggactcggccgtgtatgtctgtgcaagtcgtgacttggttaagagtgtcgtcgacatcagccccagcattttggtgatgggactcgactctccatcctaggtaagttgcagaatcagggtggtatggccattgtcccttgaaggcagagttctctcttggttaagagtgtcctgatggcgcgagggaggc

SEQ ID NO: 3708 - DNA, 495 bp, Artificial Sequence
  source: /note="Description of Artificial Sequence: Synthetic polynucleotide"
gccttgccagcccgctcagcttggttagttccgaattttatagcatgcacagatgctggcattatccagtcacccaagcatgaggtgacagaaatgggacaaacagtgactctgagatgtgagccaatttttggccacaatttccttttctggtacagagataccttcgtgcagggactggaattgctgagttacttccggagctgatctattatagataatgcaggtatgcccacagagcgattctcagctgagaggcctgatggatcattctctactctgaagatccagcctgcagagcagggggactcggccgtgtatgtctgtgcaagtcgtgacttggttagttccgaagtcgacataattcacccctccactttgggaacgggaccaggctcactgtgacaggtatgggggctccactcttgactcgggggtgcctgggtttgactgcaatgatcttggttagttccgaactgatggcgcgagggaggc

SEQ ID NO: 3709 - DNA, 495 bp, Artificial Sequence
  source: /note="Description of Artificial Sequence: Synthetic polynucleotide"
gccttgccagcccgctcagcttggttacgttacttttttatagcatgcacagatgctggcattatccagtcacccaagcatgaggtgacagaaatgggacaaacagtgactctgagatgtgagccaatttttggccacaatttccttttctggtacagagataccttcgtgcagggactggaattgctgagttacttccggagctgatctattatagataatgcaggtatgcccacagagcgattctcagctgagaggcctgatggatcattctctactctgaagatccagcctgcagagcagggggactcggccgtgtatgtctgtgcaagtcgtgacttggttacgttacttgtcgacacaatgagcagttcttcgggccagggacacggctcaccgtgctaggtaagaagggggctccaggtgggagagagggtgagcagcccagcctgcacgaccccttggttacgttacttctgatggcgcgagggaggc

SEQ ID NO: 3710 - DNA, 495 bp, Artificial Sequence
  source: /note="Description of Artificial Sequence: Synthetic polynucleotide"
gccttgccagcccgctcagcttggttataggagacttttatagcatgcacagatgctggcattatccagtcacccaagcatgaggtgacagaaatgggacaaacagtgactctgagatgtgagccaatttttggccacaatttccttttctggtacagagataccttcgtgcagggactggaattgctgagttacttccggagctgatctattatagataatgcaggtatgcccacagagcgattctcagctgagaggcctgatggatcattctctactctgaagatccagcctgcagagcagggggactcggccgtgtatgtctgtgcaagtcgtgacttggttataggagacgtcgacaccggggagctgttttttggagaaggctctaggctgaccgtactgggtaaggaggcggttggggctccggagagctccgagagggcgggatgggcagaggcttggttataggagacctgatggcgcgagggaggc

SEQ ID NO: 3711 - DNA, 495 bp, Artificial Sequence
  source: /note="Description of Artificial Sequence: Synthetic polynucleotide"
gccttgccagcccgctcagcttggttagtgtctacttttatagcatgcacagatgctggcattatccagtcacccaagcatgaggtgacagaaatgggacaaacagtgactctgagatgtgagccaatttttggccacaatttccttttctggtacagagataccttcgtgcagggactggaattgctgagttacttccggagctgatctattatagataatgcaggtatgcccacagagcgattctcagctgagaggcctgatggatcattctctactctgaagatccagcctgcagagcagggggactcggccgtgtatgtctgtgcaagtcgtgacttggttagtgtctacgtcgacagatacgcagtattttggcccaggcacccggctgacagtgctcggtaagcgggggctcccgctgaagccccggaactggggagggggcgccccgggacgccttggttagtgtctacctgatggcgcgagggaggc

SEQ ID NO: 3712 - DNA, 495 bp, Artificial Sequence
  source: /note="Description of Artificial Sequence: Synthetic polynucleotide"
gccttgccagcccgctcagcttggttagtacagtgttttatagcatgcacagatgctggcattatccagtcacccaagcatgaggtgacagaaatgggacaaacagtgactctgagatgtgagccaatttttggccacaatttccttttctggtacagagataccttcgtgcagggactggaattgctgagttacttccggagctgatctattatagataatgcaggtatgcccacagagcgattctcagctgagaggcctgatggatcattctctactctgaagatccagcctgcagagcagggggactcggccgtgtatgtctgtgcaagtcgtgacttggttagtacagtggtcgacaaaacattcagtacttcggcgccgggacccggctctcagtgctgggtaagctggggccgccgggggaccggggacgagactgcgctcgggtttttgtgcgcttggttagtacagtgctgatggcgcgagggaggc

SEQ ID NO: 3713 - DNA, 495 bp, Artificial Sequence
  source: /note="Description of Artificial Sequence: Synthetic polynucleotide"
gccttgccagcccgctcagcttggttaggatcatcttttatagcatgcacagatgctggcattatccagtcacccaagcatgaggtgacagaaatgggacaaacagtgactctgagatgtgagccaatttttggccacaatttccttttctggtacagagataccttcgtgcagggactggaattgctgagttacttccggagctgatctattatagataatgcaggtatgcccacagagcgattctcagctgagaggcctgatggatcattctctactctgaagatccagcctgcagagcagggggactcggccgtgtatgtctgtgcaagtcgtgacttggttaggatcatcgtcgacgagacccagtacttcgggccaggcacgcggctcctggtgctcggtgagcgcgggctgctggggcgcgggcgcgggcggcttgggtctggtttttgcggggcttggttaggatcatcctgatggcgcgagggaggc

SEQ ID NO: 3714 - DNA, 495 bp, Artificial Sequence
  source: /note="Description of Artificial Sequence: Synthetic polynucleotide"
gccttgccagcccgctcagcttggttatattggcgttttatagcatgcacagatgctggcattatccagtcacccaagcatgaggtgacagaaatgggacaaacagtgactctgagatgtgagccaatttttggccacaatttccttttctggtacagagataccttcgtgcagggactggaattgctgagttacttccggagctgatctattatagataatgcaggtatgcccacagagcgattctcagctgagaggcctgatggatcattctctactctgaagatccagcctgcagagcagggggactcggccgtgtatgtctgtgcaagtcgtgacttggttatattggcggtcgacgggccaacgtcctgactttcggggccggcagcaggctgaccgtgctgggtgagttttcgcgggaccacccgggcggcgggattcaggtggaaggcggcggcttggttatattggcgctgatggcgcgagggaggc

SEQ ID NO: 3715 - DNA, 495 bp, Artificial Sequence
  source: /note="Description of Artificial Sequence: Synthetic polynucleotide"
gccttgccagcccgctcagcttggttaaggcttgattttatagcatgcacagatgctggcattatccagtcacccaagcatgaggtgacagaaatgggacaaacagtgactctgagatgtgagccaatttttggccacaatttccttttctggtacagagataccttcgtgcagggactggaattgctgagttacttccggagctgatctattatagataatgcaggtatgcccacagagcgattctcagctgagaggcctgatggatcattctctactctgaagatccagcctgcagagcagggggactcggccgtgtatgtctgtgcaagtcgtgacttggttaaggcttgagtcgacacgagcagtacttcgggccgggcaccaggctcacggtcacaggtgagattcgggcgtctccccaccttccagcccctcggtccccggagtcggagggtggcttggttaaggcttgactgatggcgcgagggaggc

SEQ ID NO: 3716 - DNA, 495 bp, Artificial Sequence
  source: /note="Description of Artificial Sequence: Synthetic polynucleotide"
gccttgccagcccgctcagacctcttggacactcttttcatagagcatacagatgctggagttatccagtcaccccgccatgaggtgacagagatgggacaagaagtgactctgagatgtaaaccaatttcaggccacaactcccttttctggtacagacagaccatgatgcggggactggagttgctcatttactttaacaacaacgttccgatagatgattcagggatgcccgaggatcgattctcagctaagatgcctaatgcatcattctccactctgaagatccagccctcagaacccagggactcagctgtgtacttctgtgccagcagtgaacctcttggacactctgtcgacactgaagctttctttggacaaggcaccagactcacagttgtaggtaagacatttttcaggttcttttgcagatccgtcacagggaaaagtgggtccacagacctcttggacactctctgatggcgcgagggaggc

SEQ ID NO: 3717 - DNA, 495 bp, Artificial Sequence
  source: /note="Description of Artificial Sequence: Synthetic polynucleotide"
gccttgccagcccgctcagacctcttgttcggaactttcatagagcatacagatgctggagttatccagtcaccccgccatgaggtgacagagatgggacaagaagtgactctgagatgtaaaccaatttcaggccacaactcccttttctggtacagacagaccatgatgcggggactggagttgctcatttactttaacaacaacgttccgatagatgattcagggatgcccgaggatcgattctcagctaagatgcctaatgcatcattctccactctgaagatccagccctcagaacccagggactcagctgtgtacttctgtgccagcagtgaacctcttgttcggaacgtcgactatggctacaccttcggttcggggaccaggttaaccgttgtaggtaaggctgggggtctctaggaggggtgcgatgagggaggactctgtcctgggaaatacctcttgttcggaacctgatggcgcgagggaggc

SEQ ID NO: 3718 - DNA, 495 bp, Artificial Sequence
  source: /note="Description of Artificial Sequence: Synthetic polynucleotide"
gccttgccagcccgctcagacctcttgaagtaacgtttcatagagcatacagatgctggagttatccagtcaccccgccatgaggtgacagagatgggacaagaagtgactctgagatgtaaaccaatttcaggccacaactcccttttctggtacagacagaccatgatgcggggactggagttgctcatttactttaacaacaacgttccgatagatgattcagggatgcccgaggatcgattctcagctaagatgcctaatgcatcattctccactctgaagatccagccctcagaacccagggactcagctgtgtacttctgtgccagcagtgaacctcttgaagtaacggtcgacgaaacaccatatattttggagagggaagttggctcactgttgtaggtgagtaagtcaaggctggacagctgggaacttgcaaaaaggggctggaatccagacctcttgaagtaacgctgatggcgcgagggaggc

SEQ ID NO: 3719 - DNA, 495 bp, Artificial Sequence
  source: /note="Description of Artificial Sequence: Synthetic polynucleotide"
gccttgccagcccgctcagacctcttggtctcctatttcatagagcatacagatgctggagttatccagtcaccccgccatgaggtgacagagatgggacaagaagtgactctgagatgtaaaccaatttcaggccacaactcccttttctggtacagacagaccatgatgcggggactggagttgctcatttactttaacaacaacgttccgatagatgattcagggatgcccgaggatcgattctcagctaagatgcctaatgcatcattctccactctgaagatccagccctcagaacccagggactcagctgtgtacttctgtgccagcagtgaacctcttggtctcctagtcgacaatgaaaaactgttttttggcagtggaacccagctctctgtcttgggtatgtaaaagacttctttcgggatagtgtatcataaggtcggagttccaggagacctcttggtctcctactgatggcgcgagggaggc

SEQ ID NO: 3720 - DNA, 495 bp, Artificial Sequence
  source: /note="Description of Artificial Sequence: Synthetic polynucleotide"
gccttgccagcccgctcagacctcttgagagtgtctttcatagagcatacagatgctggagttatccagtcaccccgccatgaggtgacagagatgggacaagaagtgactctgagatgtaaaccaatttcaggccacaactcccttttctggtacagacagaccatgatgcggggactggagttgctcatttactttaacaacaacgttccgatagatgattcagggatgcccgaggatcgattctcagctaagatgcctaatgcatcattctccactctgaagatccagccctcagaacccagggactcagctgtgtacttctgtgccagcagtgaacctcttgagagtgtcgtcgacatcagccccagcattttggtgatgggactcgactctccatcctaggtaagttgcagaatcagggtggtatggccattgtcccttgaaggcagagttctctacctcttgagagtgtcctgatggcgcgagggaggc

SEQ ID NO: 3721 - DNA, 495 bp, Artificial Sequence
  source: /note="Description of Artificial Sequence: Synthetic polynucleotide"
gccttgccagcccgctcagacctcttggttccgaatttcatagagcatacagatgctggagttatccagtcaccccgccatgaggtgacagagatgggacaagaagtgactctgagatgtaaaccaatttcaggccacaactcccttttctggtacagacagaccatgatgcggggactggagttgctcatttactttaacaacaacgttccgatagatgattcagggatgcccgaggatcgattctcagctaagatgcctaatgcatcattctccactctgaagatccagccctcagaacccagggactcagctgtgtacttctgtgccagcagtgaacctcttggttccgaagtcgacataattcacccctccactttgggaacgggaccaggctcactgtgacaggtatgggggctccactcttgactcgggggtgcctgggtttgactgcaatgatacctcttggttccgaactgatggcgcgagggaggc

SEQ ID NO: 3722 - DNA, 495 bp, Artificial Sequence
  source: /note="Description of Artificial Sequence: Synthetic polynucleotide"
gccttgccagcccgctcagacctcttgcgttactttttcatagagcatacagatgctggagttatccagtcaccccgccatgaggtgacagagatgggacaagaagtgactctgagatgtaaaccaatttcaggccacaactcccttttctggtacagacagaccatgatgcggggactggagttgctcatttactttaacaacaacgttccgatagatgattcagggatgcccgaggatcgattctcagctaagatgcctaatgcatcattctccactctgaagatccagccctcagaacccagggactcagctgtgtacttctgtgccagcagtgaacctcttgcgttacttgtcgacacaatgagcagttcttcgggccagggacacggctcaccgtgctaggtaagaagggggctccaggtgggagagagggtgagcagcccagcctgcacgacccacctcttgcgttacttctgatggcgcgagggaggc

SEQ ID NO: 3723 - DNA, 495 bp, Artificial Sequence
  source: /note="Description of Artificial Sequence: Synthetic polynucleotide"
gccttgccagcccgctcagacctcttgtaggagactttcatagagcatacagatgctggagttatccagtcaccccgccatgaggtgacagagatgggacaagaagtgactctgagatgtaaaccaatttcaggccacaactcccttttctggtacagacagaccatgatgcggggactggagttgctcatttactttaacaacaacgttccgatagatgattcagggatgcccgaggatcgattctcagctaagatgcctaatgcatcattctccactctgaagatccagccctcagaacccagggactcagctgtgtacttctgtgccagcagtgaacctcttgtaggagacgtcgacaccggggagctgttttttggagaaggctctaggctgaccgtactgggtaaggaggcggttggggctccggagagctccgagagggcgggatgggcagaggacctcttgtaggagacctgatggcgcgagggaggc

SEQ ID NO: 3724 - DNA, 495 bp, Artificial Sequence
  source: /note="Description of Artificial Sequence: Synthetic polynucleotide"
gccttgccagcccgctcagacctcttggtgtctactttcatagagcatacagatgctggagttatccagtcaccccgccatgaggtgacagagatgggacaagaagtgactctgagatgtaaaccaatttcaggccacaactcccttttctggtacagacagaccatgatgcggggactggagttgctcatttactttaacaacaacgttccgatagatgattcagggatgcccgaggatcgattctcagctaagatgcctaatgcatcattctccactctgaagatccagccctcagaacccagggactcagctgtgtacttctgtgccagcagtgaacctcttggtgtctacgtcgacagatacgcagtattttggcccaggcacccggctgacagtgctcggtaagcgggggctcccgctgaagccccggaactggggagggggcgccccgggacgcacctcttggtgtctacctgatggcgcgagggaggc

SEQ ID NO: 3725 - DNA, 495 bp, Artificial Sequence
  source: /note="Description of Artificial Sequence: Synthetic polynucleotide"
gccttgccagcccgctcagacctcttggtacagtgtttcatagagcatacagatgctggagttatccagtcaccccgccatgaggtgacagagatgggacaagaagtgactctgagatgtaaaccaatttcaggccacaactcccttttctggtacagacagaccatgatgcggggactggagttgctcatttactttaacaacaacgttccgatagatgattcagggatgcccgaggatcgattctcagctaagatgcctaatgcatcattctccactctgaagatccagccctcagaacccagggactcagctgtgtacttctgtgccagcagtgaacctcttggtacagtggtcgacaaaacattcagtacttcggcgccgggacccggctctcagtgctgggtaagctggggccgccgggggaccggggacgagactgcgctcgggtttttgtgcgacctcttggtacagtgctgatggcgcgagggaggc

SEQ ID NO: 3726 - DNA, 495 bp, Artificial Sequence
  source: /note="Description of Artificial Sequence: Synthetic polynucleotide"
gccttgccagcccgctcagacctcttgggatcatctttcatagagcatacagatgctggagttatccagtcaccccgccatgaggtgacagagatgggacaagaagtgactctgagatgtaaaccaatttcaggccacaactcccttttctggtacagacagaccatgatgcggggactggagttgctcatttactttaacaacaacgttccgatagatgattcagggatgcccgaggatcgattctcagctaagatgcctaatgcatcattctccactctgaagatccagccctcagaacccagggactcagctgtgtacttctgtgccagcagtgaacctcttgggatcatcgtcgacgagacccagtacttcgggccaggcacgcggctcctggtgctcggtgagcgcgggctgctggggcgcgggcgcgggcggcttgggtctggtttttgcggggacctcttgggatcatcctgatggcgcgagggaggc

SEQ ID NO: 3727 - DNA, 495 bp, Artificial Sequence
  source: /note="Description of Artificial Sequence: Synthetic polynucleotide"
gccttgccagcccgctcagacctcttgtattggcgtttcatagagcatacagatgctggagttatccagtcaccccgccatgaggtgacagagatgggacaagaagtgactctgagatgtaaaccaatttcaggccacaactcccttttctggtacagacagaccatgatgcggggactggagttgctcatttactttaacaacaacgttccgatagatgattcagggatgcccgaggatcgattctcagctaagatgcctaatgcatcattctccactctgaagatccagccctcagaacccagggactcagctgtgtacttctgtgccagcagtgaacctcttgtattggcggtcgacgggccaacgtcctgactttcggggccggcagcaggctgaccgtgctgggtgagttttcgcgggaccacccgggcggcgggattcaggtggaaggcggcggacctcttgtattggcgctgatggcgcgagggaggc

SEQ ID NO: 3728 - DNA, 495 bp, Artificial Sequence
  source: /note="Description of Artificial Sequence: Synthetic polynucleotide"
gccttgccagcccgctcagacctcttgaggcttgatttcatagagcatacagatgctggagttatccagtcaccccgccatgaggtgacagagatgggacaagaagtgactctgagatgtaaaccaatttcaggccacaactcccttttctggtacagacagaccatgatgcggggactggagttgctcatttactttaacaacaacgttccgatagatgattcagggatgcccgaggatcgattctcagctaagatgcctaatgcatcattctccactctgaagatccagccctcagaacccagggactcagctgtgtacttctgtgccagcagtgaacctcttgaggcttgagtcgacacgagcagtacttcgggccgggcaccaggctcacggtcacaggtgagattcgggcgtctccccaccttccagcccctcggtccccggagtcggagggtggacctcttgaggcttgactgatggcgcgagggaggc

SEQ ID NO: 3729 - DNA, 495 bp, Artificial Sequence
  source: /note="Description of Artificial Sequence: Synthetic polynucleotide"
gccttgccagcccgctcagctgattctgacactctcttcatagagcacacagatgctggagttatccagtcaccccggcacgaggtgacagagatgggacaagaagtgactctgagatgtaaaccaatttcaggacacgactaccttttctggtacagacagaccatgatgcggggactggagttgctcatttactttaacaacaacgttccgatagatgattcagggatgcccgaggatcgattctcagctaagatgcctaatgcatcattctccactctgaagatccagccctcagaacccagggactcagctgtgtacttctgtgccagcagtgactgattctgacactctgtcgacactgaagctttctttggacaaggcaccagactcacagttgtaggtaagacatttttcaggttcttttgcagatccgtcacagggaaaagtgggtccacagctgattctgacactctctgatggcgcgagggaggc

SEQ ID NO: 3730 - DNA, 495 bp, Artificial Sequence
  source: /note="Description of Artificial Sequence: Synthetic polynucleotide"
gccttgccagcccgctcagctgattctttcggaaccttcatagagcacacagatgctggagttatccagtcaccccggcacgaggtgacagagatgggacaagaagtgactctgagatgtaaaccaatttcaggacacgactaccttttctggtacagacagaccatgatgcggggactggagttgctcatttactttaacaacaacgttccgatagatgattcagggatgcccgaggatcgattctcagctaagatgcctaatgcatcattctccactctgaagatccagccctcagaacccagggactcagctgtgtacttctgtgccagcagtgactgattctttcggaacgtcgactatggctacaccttcggttcggggaccaggttaaccgttgtaggtaaggctgggggtctctaggaggggtgcgatgagggaggactctgtcctgggaaatctgattctttcggaacctgatggcgcgagggaggc

SEQ ID NO: 3731 - DNA, 495 bp, Artificial Sequence
  source: /note="Description of Artificial Sequence: Synthetic polynucleotide"
gccttgccagcccgctcagctgattctaagtaacgcttcatagagcacacagatgctggagttatccagtcaccccggcacgaggtgacagagatgggacaagaagtgactctgagatgtaaaccaatttcaggacacgactaccttttctggtacagacagaccatgatgcggggactggagttgctcatttactttaacaacaacgttccgatagatgattcagggatgcccgaggatcgattctcagctaagatgcctaatgcatcattctccactctgaagatccagccctcagaacccagggactcagctgtgtacttctgtgccagcagtgactgattctaagtaacggtcgacgaaacaccatatattttggagagggaagttggctcactgttgtaggtgagtaagtcaaggctggacagctgggaacttgcaaaaaggggctggaatccagctgattctaagtaacgctgatggcgcgagggaggc

SEQ ID NO: 3732 - DNA, 495 bp, Artificial Sequence
  source: /note="Description of Artificial Sequence: Synthetic polynucleotide"
gccttgccagcccgctcagctgattctgtctcctacttcatagagcacacagatgctggagttatccagtcaccccggcacgaggtgacagagatgggacaagaagtgactctgagatgtaaaccaatttcaggacacgactaccttttctggtacagacagaccatgatgcggggactggagttgctcatttactttaacaacaacgttccgatagatgattcagggatgcccgaggatcgattctcagctaagatgcctaatgcatcattctccactctgaagatccagccctcagaacccagggactcagctgtgtacttctgtgccagcagtgactgattctgtctcctagtcgacaatgaaaaactgttttttggcagtggaacccagctctctgtcttgggtatgtaaaagacttctttcgggatagtgtatcataaggtcggagttccaggagctgattctgtctcctactgatggcgcgagggaggc

SEQ ID NO: 3733 - DNA, 495 bp, Artificial Sequence
  source: /note="Description of Artificial Sequence: Synthetic polynucleotide"
gccttgccagcccgctcagctgattctagagtgtccttcatagagcacacagatgctggagttatccagtcaccccggcacgaggtgacagagatgggacaagaagtgactctgagatgtaaaccaatttcaggacacgactaccttttctggtacagacagaccatgatgcggggactggagttgctcatttactttaacaacaacgttccgatagatgattcagggatgcccgaggatcgattctcagctaagatgcctaatgcatcattctccactctgaagatccagccctcagaacccagggactcagctgtgtacttctgtgccagcagtgactgattctagagtgtcgtcgacatcagccccagcattttggtgatgggactcgactctccatcctaggtaagttgcagaatcagggtggtatggccattgtcccttgaaggcagagttctctctgattctagagtgtcctgatggcgcgagggaggc

SEQ ID NO: 3734 - DNA, 495 bp, Artificial Sequence
  source: /note="Description of Artificial Sequence: Synthetic polynucleotide"
gccttgccagcccgctcagctgattctgttccgaacttcatagagcacacagatgctggagttatccagtcaccccggcacgaggtgacagagatgggacaagaagtgactctgagatgtaaaccaatttcaggacacgactaccttttctggtacagacagaccatgatgcggggactggagttgctcatttactttaacaacaacgttccgatagatgattcagggatgcccgaggatcgattctcagctaagatgcctaatgcatcattctccactctgaagatccagccctcagaacccagggactcagctgtgtacttctgtgccagcagtgactgattctgttccgaagtcgacataattcacccctccactttgggaacgggaccaggctcactgtgacaggtatgggggctccactcttgactcgggggtgcctgggtttgactgcaatgatctgattctgttccgaactgatggcgcgagggaggc

SEQ ID NO: 3735 - DNA, 495 bp, Artificial Sequence
  source: /note="Description of Artificial Sequence: Synthetic polynucleotide"
gccttgccagcccgctcagctgattctcgttacttcttcatagagcacacagatgctggagttatccagtcaccccggcacgaggtgacagagatgggacaagaagtgactctgagatgtaaaccaatttcaggacacgactaccttttctggtacagacagaccatgatgcggggactggagttgctcatttactttaacaacaacgttccgatagatgattcagggatgcccgaggatcgattctcagctaagatgcctaatgcatcattctccactctgaagatccagccctcagaacccagggactcagctgtgtacttctgtgccagcagtgactgattctcgttacttgtcgacacaatgagcagttcttcgggccagggacacggctcaccgtgctaggtaagaagggggctccaggtgggagagagggtgagcagcccagcctgcacgacccctgattctcgttacttctgatggcgcgagggaggc

SEQ ID NO: 3736 - DNA, 495 bp, Artificial Sequence
  source: /note="Description of Artificial Sequence: Synthetic polynucleotide"
gccttgccagcccgctcagctgattcttaggagaccttcatagagcacacagatgctggagttatccagtcaccccggcacgaggtgacagagatgggacaagaagtgactctgagatgtaaaccaatttcaggacacgactaccttttctggtacagacagaccatgatgcggggactggagttgctcatttactttaacaacaacgttccgatagatgattcagggatgcccgaggatcgattctcagctaagatgcctaatgcatcattctccactctgaagatccagccctcagaacccagggactcagctgtgtacttctgtgccagcagtgactgattcttaggagacgtcgacaccggggagctgttttttggagaaggctctaggctgaccgtactgggtaaggaggcggttggggctccggagagctccgagagggcgggatgggcagaggctgattcttaggagacctgatggcgcgagggaggc

SEQ ID NO: 3737 - DNA, 495 bp, Artificial Sequence
  source: /note="Description of Artificial Sequence: Synthetic polynucleotide"
gccttgccagcccgctcagctgattctgtgtctaccttcatagagcacacagatgctggagttatccagtcaccccggcacgaggtgacagagatgggacaagaagtgactctgagatgtaaaccaatttcaggacacgactaccttttctggtacagacagaccatgatgcggggactggagttgctcatttactttaacaacaacgttccgatagatgattcagggatgcccgaggatcgattctcagctaagatgcctaatgcatcattctccactctgaagatccagccctcagaacccagggactcagctgtgtacttctgtgccagcagtgactgattctgtgtctacgtcgacagatacgcagtattttggcccaggcacccggctgacagtgctcggtaagcgggggctcccgctgaagccccggaactggggagggggcgccccgggacgcctgattctgtgtctacctgatggcgcgagggaggc

SEQ ID NO: 3738 - DNA, 495 bp, Artificial Sequence
  source: /note="Description of Artificial Sequence: Synthetic polynucleotide"
gccttgccagcccgctcagctgattctgtacagtgcttcatagagcacacagatgctggagttatccagtcaccccggcacgaggtgacagagatgggacaagaagtgactctgagatgtaaaccaatttcaggacacgactaccttttctggtacagacagaccatgatgcggggactggagttgctcatttactttaacaacaacgttccgatagatgattcagggatgcccgaggatcgattctcagctaagatgcctaatgcatcattctccactctgaagatccagccctcagaacccagggactcagctgtgtacttctgtgccagcagtgactgattctgtacagtggtcgacaaaacattcagtacttcggcgccgggacccggctctcagtgctgggtaagctggggccgccgggggaccggggacgagactgcgctcgggtttttgtgcgctgattctgtacagtgctgatggcgcgagggaggc

SEQ ID NO: 3739 - DNA, 495 bp, Artificial Sequence
  source: /note="Description of Artificial Sequence: Synthetic polynucleotide"
gccttgccagcccgctcagctgattctggatcatccttcatagagcacacagatgctggagttatccagtcaccccggcacgaggtgacagagatgggacaagaagtgactctgagatgtaaaccaatttcaggacacgactaccttttctggtacagacagaccatgatgcggggactggagttgctcatttactttaacaacaacgttccgatagatgattcagggatgcccgaggatcgattctcagctaagatgcctaatgcatcattctccactctgaagatccagccctcagaacccagggactcagctgtgtacttctgtgccagcagtgactgattctggatcatcgtcgacgagacccagtacttcgggccaggcacgcggctcctggtgctcggtgagcgcgggctgctggggcgcgggcgcgggcggcttgggtctggtttttgcggggctgattctggatcatcctgatggcgcgagggaggc

SEQ ID NO: 3740 - DNA, 495 bp, Artificial Sequence
  source: /note="Description of Artificial Sequence: Synthetic polynucleotide"
gccttgccagcccgctcagctgattcttattggcgcttcatagagcacacagatgctggagttatccagtcaccccggcacgaggtgacagagatgggacaagaagtgactctgagatgtaaaccaatttcaggacacgactaccttttctggtacagacagaccatgatgcggggactggagttgctcatttactttaacaacaacgttccgatagatgattcagggatgcccgaggatcgattctcagctaagatgcctaatgcatcattctccactctgaagatccagccctcagaacccagggactcagctgtgtacttctgtgccagcagtgactgattcttattggcggtcgacgggccaacgtcctgactttcggggccggcagcaggctgaccgtgctgggtgagttttcgcgggaccacccgggcggcgggattcaggtggaaggcggcggctgattcttattggcgctgatggcgcgagggaggc

SEQ ID NO: 3741 - DNA, 495 bp, Artificial Sequence
  source: /note="Description of Artificial Sequence: Synthetic polynucleotide"
gccttgccagcccgctcagctgattctaggcttgacttcatagagcacacagatgctggagttatccagtcaccccggcacgaggtgacagagatgggacaagaagtgactctgagatgtaaaccaatttcaggacacgactaccttttctggtacagacagaccatgatgcggggactggagttgctcatttactttaacaacaacgttccgatagatgattcagggatgcccgaggatcgattctcagctaagatgcctaatgcatcattctccactctgaagatccagccctcagaacccagggactcagctgtgtacttctgtgccagcagtgactgattctaggcttgagtcgacacgagcagtacttcgggccgggcaccaggctcacggtcacaggtgagattcgggcgtctccccaccttccagcccctcggtccccggagtcggagggtggctgattctaggcttgactgatggcgcgagggaggc

SEQ ID NO: 3742 - DNA, 495 bp, Artificial Sequence
  source: /note="Description of Artificial Sequence: Synthetic polynucleotide"
gccttgccagcccgctcagggtcaactgacactcttttcacagagcttatagatgctagagtcacccagacaccaaggcacaaggtgacagagatgggacaagaagtaacaatgagatgtcagccaattttaggccacaatactgttttctggtacagacagaccatgatgcaaggactggagttgctggcttacttccgcaaccgggctcctctagatgattcggggatgccgaaggatcgattctcagcagagatgcctgatgcaactttagccactctgaagatccagccctcagaacccagggactcagctgtgtatttttgtgctagtggtgaggtcaactgacactctgtcgacactgaagctttctttggacaaggcaccagactcacagttgtaggtaagacatttttcaggttcttttgcagatccgtcacagggaaaagtgggtccacagggtcaactgacactctctgatggcgcgagggaggc

SEQ ID NO: 3743 - DNA, 495 bp, Artificial Sequence
  source: /note="Description of Artificial Sequence: Synthetic polynucleotide"
gccttgccagcccgctcagggtcaactttcggaactttcacagagcttatagatgctagagtcacccagacaccaaggcacaaggtgacagagatgggacaagaagtaacaatgagatgtcagccaattttaggccacaatactgttttctggtacagacagaccatgatgcaaggactggagttgctggcttacttccgcaaccgggctcctctagatgattcggggatgccgaaggatcgattctcagcagagatgcctgatgcaactttagccactctgaagatccagccctcagaacccagggactcagctgtgtatttttgtgctagtggtgaggtcaactttcggaacgtcgactatggctacaccttcggttcggggaccaggttaaccgttgtaggtaaggctgggggtctctaggaggggtgcgatgagggaggactctgtcctgggaaatggtcaactttcggaacctgatggcgcgagggaggc

SEQ ID NO: 3744 - DNA, 495 bp, Artificial Sequence
  source: /note="Description of Artificial Sequence: Synthetic polynucleotide"
gccttgccagcccgctcagggtcaactaagtaacgtttcacagagcttatagatgctagagtcacccagacaccaaggcacaaggtgacagagatgggacaagaagtaacaatgagatgtcagccaattttaggccacaatactgttttctggtacagacagaccatgatgcaaggactggagttgctggcttacttccgcaaccgggctcctctagatgattcggggatgccgaaggatcgattctcagcagagatgcctgatgcaactttagccactctgaagatccagccctcagaacccagggactcagctgtgtatttttgtgctagtggtgaggtcaactaagtaacggtcgacgaaacaccatatattttggagagggaagttggctcactgttgtaggtgagtaagtcaaggctggacagctgggaacttgcaaaaaggggctggaatccagggtcaactaagtaacgctgatggcgcgagggaggc

SEQ ID NO: 3745 - DNA, 495 bp, Artificial Sequence
  source: /note="Description of Artificial Sequence: Synthetic polynucleotide"
gccttgccagcccgctcagggtcaactgtctcctatttcacagagcttatagatgctagagtcacccagacaccaaggcacaaggtgacagagatgggacaagaagtaacaatgagatgtcagccaattttaggccacaatactgttttctggtacagacagaccatgatgcaaggactggagttgctggcttacttccgcaaccgggctcctctagatgattcggggatgccgaaggatcgattctcagcagagatgcctgatgcaactttagccactctgaagatccagccctcagaacccagggactcagctgtgtatttttgtgctagtggtgaggtcaactgtctcctagtcgacaatgaaaaactgttttttggcagtggaacccagctctctgtcttgggtatgtaaaagacttctttcgggatagtgtatcataaggtcggagttccaggagggtcaactgtctcctactgatggcgcgagggaggc

SEQ ID NO: 3746 - DNA, 495 bp, Artificial Sequence
  source: /note="Description of Artificial Sequence: Synthetic polynucleotide"
gccttgccagcccgctcagggtcaactagagtgtctttcacagagcttatagatgctagagtcacccagacaccaaggcacaaggtgacagagatgggacaagaagtaacaatgagatgtcagccaattttaggccacaatactgttttctggtacagacagaccatgatgcaaggactggagttgctggcttacttccgcaaccgggctcctctagatgattcggggatgccgaaggatcgattctcagcagagatgcctgatgcaactttagccactctgaagatccagccctcagaacccagggactcagctgtgtatttttgtgctagtggtgaggtcaactagagtgtcgtcgacatcagccccagcattttggtgatgggactcgactctccatcctaggtaagttgcagaatcagggtggtatggccattgtcccttgaaggcagagttctctggtcaactagagtgtcctgatggcgcgagggaggc

SEQ ID NO: 3747 - DNA, 495 bp, Artificial Sequence
  source: /note="Description of Artificial Sequence: Synthetic polynucleotide"
gccttgccagcccgctcagggtcaactgttccgaatttcacagagcttatagatgctagagtcacccagacaccaaggcacaaggtgacagagatgggacaagaagtaacaatgagatgtcagccaattttaggccacaatactgttttctggtacagacagaccatgatgcaaggactggagttgctggcttacttccgcaaccgggctcctctagatgattcggggatgccgaaggatcgattctcagcagagatgcctgatgcaactttagccactctgaagatccagccctcagaacccagggactcagctgtgtatttttgtgctagtggtgaggtcaactgttccgaagtcgacataattcacccctccactttgggaacgggaccaggctcactgtgacaggtatgggggctccactcttgactcgggggtgcctgggtttgactgcaatgatggtcaactgttccgaactgatggcgcgagggaggc

SEQ ID NO: 3748 - DNA, 495 bp, Artificial Sequence
  source: /note="Description of Artificial Sequence: Synthetic polynucleotide"
gccttgccagcccgctcagggtcaactcgttactttttcacagagcttatagatgctagagtcacccagacaccaaggcacaaggtgacagagatgggacaagaagtaacaatgagatgtcagccaattttaggccacaatactgttttctggtacagacagaccatgatgcaaggactggagttgctggcttacttccgcaaccgggctcctctagatgattcggggatgccgaaggatcgattctcagcagagatgcctgatgcaactttagccactctgaagatccagccctcagaacccagggactcagctgtgtatttttgtgctagtggtgaggtcaactcgttacttgtcgacacaatgagcagttcttcgggccagggacacggctcaccgtgctaggtaagaagggggctccaggtgggagagagggtgagcagcccagcctgcacgacccggtcaactcgttacttctgatggcgcgagggaggc

SEQ ID NO: 3749 - DNA, 495 bp, Artificial Sequence
  source: /note="Description of Artificial Sequence: Synthetic polynucleotide"
gccttgccagcccgctcagggtcaacttaggagactttcacagagcttatagatgctagagtcacccagacaccaaggcacaaggtgacagagatgggacaagaagtaacaatgagatgtcagccaattttaggccacaatactgttttctggtacagacagaccatgatgcaaggactggagttgctggcttacttccgcaaccgggctcctctagatgattcggggatgccgaaggatcgattctcagcagagatgcctgatgcaactttagccactctgaagatccagccctcagaacccagggactcagctgtgtatttttgtgctagtggtgaggtcaacttaggagacgtcgacaccggggagctgttttttggagaaggctctaggctgaccgtactgggtaaggaggcggttggggctccggagagctccgagagggcgggatgggcagaggggtcaacttaggagacctgatggcgcgagggaggc

SEQ ID NO: 3750 - DNA, 495 bp, Artificial Sequence
  source: /note="Description of Artificial Sequence: Synthetic polynucleotide"
gccttgccagcccgctcagggtcaactgtgtctactttcacagagcttatagatgctagagtcacccagacaccaaggcacaaggtgacagagatgggacaagaagtaacaatgagatgtcagccaattttaggccacaatactgttttctggtacagacagaccatgatgcaaggactggagttgctggcttacttccgcaaccgggctcctctagatgattcggggatgccgaaggatcgattctcagcagagatgcctgatgcaactttagccactctgaagatccagccctcagaacccagggactcagctgtgtatttttgtgctagtggtgaggtcaactgtgtctacgtcgacagatacgcagtattttggcccaggcacccggctgacagtgctcggtaagcgggggctcccgctgaagccccggaactggggagggggcgccccgggacgcggtcaactgtgtctacctgatggcgcgagggaggc

SEQ ID NO: 3751 - DNA, 495 bp, Artificial Sequence
  source: /note="Description of Artificial Sequence: Synthetic polynucleotide"
gccttgccagcccgctcagggtcaactgtacagtgtttcacagagcttatagatgctagagtcacccagacaccaaggcacaaggtgacagagatgggacaagaagtaacaatgagatgtcagccaattttaggccacaatactgttttctggtacagacagaccatgatgcaaggactggagttgctggcttacttccgcaaccgggctcctctagatgattcggggatgccgaaggatcgattctcagcagagatgcctgatgcaactttagccactctgaagatccagccctcagaacccagggactcagctgtgtatttttgtgctagtggtgaggtcaactgtacagtggtcgacaaaacattcagtacttcggcgccgggacccggctctcagtgctgggtaagctggggccgccgggggaccggggacgagactgcgctcgggtttttgtgcgggtcaactgtacagtgctgatggcgcgagggaggc

SEQ ID NO: 3752 - DNA, 495 bp, Artificial Sequence
  source: /note="Description of Artificial Sequence: Synthetic polynucleotide"
gccttgccagcccgctcagggtcaactggatcatctttcacagagcttatagatgctagagtcacccagacaccaaggcacaaggtgacagagatgggacaagaagtaacaatgagatgtcagccaattttaggccacaatactgttttctggtacagacagaccatgatgcaaggactggagttgctggcttacttccgcaaccgggctcctctagatgattcggggatgccgaaggatcgattctcagcagagatgcctgatgcaactttagccactctgaagatccagccctcagaacccagggactcagctgtgtatttttgtgctagtggtgaggtcaactggatcatcgtcgacgagacccagtacttcgggccaggcacgcggctcctggtgctcggtgagcgcgggctgctggggcgcgggcgcgggcggcttgggtctggtttttgcggggggtcaactggatcatcctgatggcgcgagggaggc

SEQ ID NO: 3753 - DNA, 495 bp, Artificial Sequence
  source: /note="Description of Artificial Sequence: Synthetic polynucleotide"
gccttgccagcccgctcagggtcaacttattggcgtttcacagagcttatagatgctagagtcacccagacaccaaggcacaaggtgacagagatgggacaagaagtaacaatgagatgtcagccaattttaggccacaatactgttttctggtacagacagaccatgatgcaaggactggagttgctggcttacttccgcaaccgggctcctctagatgattcggggatgccgaaggatcgattctcagcagagatgcctgatgcaactttagccactctgaagatccagccctcagaacccagggactcagctgtgtatttttgtgctagtggtgaggtcaacttattggcggtcgacgggccaacgtcctgactttcggggccggcagcaggctgaccgtgctgggtgagttttcgcgggaccacccgggcggcgggattcaggtggaaggcggcggggtcaacttattggcgctgatggcgcgagggaggc

SEQ ID NO: 3754 - DNA, 495 bp, Artificial Sequence
  source: /note="Description of Artificial Sequence: Synthetic polynucleotide"
gccttgccagcccgctcagggtcaactaggcttgatttcacagagcttatagatgctagagtcacccagacaccaaggcacaaggtgacagagatgggacaagaagtaacaatgagatgtcagccaattttaggccacaatactgttttctggtacagacagaccatgatgcaaggactggagttgctggcttacttccgcaaccgggctcctctagatgattcggggatgccgaaggatcgattctcagcagagatgcctgatgcaactttagccactctgaagatccagccctcagaacccagggactcagctgtgtatttttgtgctagtggtgaggtcaactaggcttgagtcgacacgagcagtacttcgggccgggcaccaggctcacggtcacaggtgagattcgggcgtctccccaccttccagcccctcggtccccggagtcggagggtggggtcaactaggcttgactgatggcgcgagggaggc

SEQ ID NO: 3755 - DNA, 495 bp, Artificial Sequence
  source: /note="Description of Artificial Sequence: Synthetic polynucleotide"
gccttgccagcccgctcaggcataactgacactctttcctccacagtttcagtggctgctggagtcatccagtccccaagacatctgatcaaagaaaagagggaaacagccactctgaaatgctatcctatccctagacacgacactgtctactggtaccagcagggtccaggtcaggacccccagttcctcatttcgttttatgaaaagatgcagagcgataaaggaagcatccctgatcgattctcagctcaacagttcagtgactatcattctgaactgaacatgagctccttggagctgggggactcagccctgtacttctgtgccagcagtgagcataactgacactctgtcgacactgaagctttctttggacaaggcaccagactcacagttgtaggtaagacatttttcaggttcttttgcagatccgtcacagggaaaagtgggtccacaggcataactgacactctctgatggcgcgagggaggc

SEQ ID NO: 3756 - DNA, 495 bp, Artificial Sequence
  source: /note="Description of Artificial Sequence: Synthetic polynucleotide"
gccttgccagcccgctcaggcataactttcggaacttcctccacagtttcagtggctgctggagtcatccagtccccaagacatctgatcaaagaaaagagggaaacagccactctgaaatgctatcctatccctagacacgacactgtctactggtaccagcagggtccaggtcaggacccccagttcctcatttcgttttatgaaaagatgcagagcgataaaggaagcatccctgatcgattctcagctcaacagttcagtgactatcattctgaactgaacatgagctccttggagctgggggactcagccctgtacttctgtgccagcagtgagcataactttcggaacgtcgactatggctacaccttcggttcggggaccaggttaaccgttgtaggtaaggctgggggtctctaggaggggtgcgatgagggaggactctgtcctgggaaatgcataactttcggaacctgatggcgcgagggaggc

SEQ ID NO: 3757 - DNA, 495 bp, Artificial Sequence
  source: /note="Description of Artificial Sequence: Synthetic polynucleotide"
gccttgccagcccgctcaggcataactaagtaacgttcctccacagtttcagtggctgctggagtcatccagtccccaagacatctgatcaaagaaaagagggaaacagccactctgaaatgctatcctatccctagacacgacactgtctactggtaccagcagggtccaggtcaggacccccagttcctcatttcgttttatgaaaagatgcagagcgataaaggaagcatccctgatcgattctcagctcaacagttcagtgactatcattctgaactgaacatgagctccttggagctgggggactcagccctgtacttctgtgccagcagtgagcataactaagtaacggtcgacgaaacaccatatattttggagagggaagttggctcactgttgtaggtgagtaagtcaaggctggacagctgggaacttgcaaaaaggggctggaatccaggcataactaagtaacgctgatggcgcgagggaggc

SEQ ID NO: 3758 - DNA, 495 bp, Artificial Sequence
  source: /note="Description of Artificial Sequence: Synthetic polynucleotide"
gccttgccagcccgctcaggcataactgtctcctattcctccacagtttcagtggctgctggagtcatccagtccccaagacatctgatcaaagaaaagagggaaacagccactctgaaatgctatcctatccctagacacgacactgtctactggtaccagcagggtccaggtcaggacccccagttcctcatttcgttttatgaaaagatgcagagcgataaaggaagcatccctgatcgattctcagctcaacagttcagtgactatcattctgaactgaacatgagctccttggagctgggggactcagccctgtacttctgtgccagcagtgagcataactgtctcctagtcgacaatgaaaaactgttttttggcagtggaacccagctctctgtcttgggtatgtaaaagacttctttcgggatagtgtatcataaggtcggagttccaggaggcataactgtctcctactgatggcgcgagggaggc

SEQ ID NO: 3759 - DNA, 495 bp, Artificial Sequence
  source: /note="Description of Artificial Sequence: Synthetic polynucleotide"
gccttgccagcccgctcaggcataactagagtgtcttcctccacagtttcagtggctgctggagtcatccagtccccaagacatctgatcaaagaaaagagggaaacagccactctgaaatgctatcctatccctagacacgacactgtctactggtaccagcagggtccaggtcaggacccccagttcctcatttcgttttatgaaaagatgcagagcgataaaggaagcatccctgatcgattctcagctcaacagttcagtgactatcattctgaactgaacatgagctccttggagctgggggactcagccctgtacttctgtgccagcagtgagcataactagagtgtcgtcgacatcagccccagcattttggtgatgggactcgactctccatcctaggtaagttgcagaatcagggtggtatggccattgtcccttgaaggcagagttctctgcataactagagtgtcctgatggcgcgagggaggc

SEQ ID NO: 3760 - DNA, 495 bp, Artificial Sequence
  source: /note="Description of Artificial Sequence: Synthetic polynucleotide"
gccttgccagcccgctcaggcataactgttccgaattcctccacagtttcagtggctgctggagtcatccagtccccaagacatctgatcaaagaaaagagggaaacagccactctgaaatgctatcctatccctagacacgacactgtctactggtaccagcagggtccaggtcaggacccccagttcctcatttcgttttatgaaaagatgcagagcgataaaggaagcatccctgatcgattctcagctcaacagttcagtgactatcattctgaactgaacatgagctccttggagctgggggactcagccctgtacttctgtgccagcagtgagcataactgttccgaagtcgacataattcacccctccactttgggaacgggaccaggctcactgtgacaggtatgggggctccactcttgactcgggggtgcctgggtttgactgcaatgatgcataactgttccgaactgatggcgcgagggaggc

SEQ ID NO: 3761 - DNA, 495 bp, Artificial Sequence
  source: /note="Description of Artificial Sequence: Synthetic polynucleotide"
gccttgccagcccgctcaggcataactcgttacttttcctccacagtttcagtggctgctggagtcatccagtccccaagacatctgatcaaagaaaagagggaaacagccactctgaaatgctatcctatccctagacacgacactgtctactggtaccagcagggtccaggtcaggacccccagttcctcatttcgttttatgaaaagatgcagagcgataaaggaagcatccctgatcgattctcagctcaacagttcagtgactatcattctgaactgaacatgagctccttggagctgggggactcagccctgtacttctgtgccagcagtgagcataactcgttacttgtcgacacaatgagcagttcttcgggccagggacacggctcaccgtgctaggtaagaagggggctccaggtgggagagagggtgagcagcccagcctgcacgacccgcataactcgttacttctgatggcgcgagggaggc

SEQ ID NO: 3762 - DNA, 495 bp, Artificial Sequence
  source: /note="Description of Artificial Sequence: Synthetic polynucleotide"
gccttgccagcccgctcaggcataacttaggagacttcctccacagtttcagtggctgctggagtcatccagtccccaagacatctgatcaaagaaaagagggaaacagccactctgaaatgctatcctatccctagacacgacactgtctactggtaccagcagggtccaggtcaggacccccagttcctcatttcgttttatgaaaagatgcagagcgataaaggaagcatccctgatcgattctcagctcaacagttcagtgactatcattctgaactgaacatgagctccttggagctgggggactcagccctgtacttctgtgccagcagtgagcataacttaggagacgtcgacaccggggagctgttttttggagaaggctctaggctgaccgtactgggtaaggaggcggttggggctccggagagctccgagagggcgggatgggcagagggcataacttaggagacctgatggcgcgagggaggc

SEQ ID NO: 3763 - DNA, 495 bp, Artificial Sequence
  source: /note="Description of Artificial Sequence: Synthetic polynucleotide"
gccttgccagcccgctcaggcataactgtgtctacttcctccacagtttcagtggctgctggagtcatccagtccccaagacatctgatcaaagaaaagagggaaacagccactctgaaatgctatcctatccctagacacgacactgtctactggtaccagcagggtccaggtcaggacccccagttcctcatttcgttttatgaaaagatgcagagcgataaaggaagcatccctgatcgattctcagctcaacagttcagtgactatcattctgaactgaacatgagctccttggagctgggggactcagccctgtacttctgtgccagcagtgagcataactgtgtctacgtcgacagatacgcagtattttggcccaggcacccggctgacagtgctcggtaagcgggggctcccgctgaagccccggaactggggagggggcgccccgggacgcgcataactgtgtctacctgatggcgcgagggaggc

SEQ ID NO: 3764 - DNA, 495 bp, Artificial Sequence
  source: /note="Description of Artificial Sequence: Synthetic polynucleotide"
gccttgccagcccgctcaggcataactgtacagtgttcctccacagtttcagtggctgctggagtcatccagtccccaagacatctgatcaaagaaaagagggaaacagccactctgaaatgctatcctatccctagacacgacactgtctactggtaccagcagggtccaggtcaggacccccagttcctcatttcgttttatgaaaagatgcagagcgataaaggaagcatccctgatcgattctcagctcaacagttcagtgactatcattctgaactgaacatgagctccttggagctgggggactcagccctgtacttctgtgccagcagtgagcataactgtacagtggtcgacaaaacattcagtacttcggcgccgggacccggctctcagtgctgggtaagctggggccgccgggggaccggggacgagactgcgctcgggtttttgtgcggcataactgtacagtgctgatggcgcgagggaggc

SEQ ID NO: 3765 - DNA, 495 bp, Artificial Sequence
  source: /note="Description of Artificial Sequence: Synthetic polynucleotide"
gccttgccagcccgctcaggcataactggatcatcttcctccacagtttcagtggctgctggagtcatccagtccccaagacatctgatcaaagaaaagagggaaacagccactctgaaatgctatcctatccctagacacgacactgtctactggtaccagcagggtccaggtcaggacccccagttcctcatttcgttttatgaaaagatgcagagcgataaaggaagcatccctgatcgattctcagctcaacagttcagtgactatcattctgaactgaacatgagctccttggagctgggggactcagccctgtacttctgtgccagcagtgagcataactggatcatcgtcgacgagacccagtacttcgggccaggcacgcggctcctggtgctcggtgagcgcgggctgctggggcgcgggcgcgggcggcttgggtctggtttttgcgggggcataactggatcatcctgatggcgcgagggaggc

SEQ ID NO: 3766 - DNA, 495 bp, Artificial Sequence
  source: /note="Description of Artificial Sequence: Synthetic polynucleotide"
gccttgccagcccgctcaggcataacttattggcgttcctccacagtttcagtggctgctggagtcatccagtccccaagacatctgatcaaagaaaagagggaaacagccactctgaaatgctatcctatccctagacacgacactgtctactggtaccagcagggtccaggtcaggacccccagttcctcatttcgttttatgaaaagatgcagagcgataaaggaagcatccctgatcgattctcagctcaacagttcagtgactatcattctgaactgaacatgagctccttggagctgggggactcagccctgtacttctgtgccagcagtgagcataacttattggcggtcgacgggccaacgtcctgactttcggggccggcagcaggctgaccgtgctgggtgagttttcgcgggaccacccgggcggcgggattcaggtggaaggcggcgggcataacttattggcgctgatggcgcgagggaggc

SEQ ID NO: 3767 - DNA, 495 bp, Artificial Sequence
  source: /note="Description of Artificial Sequence: Synthetic polynucleotide"
gccttgccagcccgctcaggcataactaggcttgattcctccacagtttcagtggctgctggagtcatccagtccccaagacatctgatcaaagaaaagagggaaacagccactctgaaatgctatcctatccctagacacgacactgtctactggtaccagcagggtccaggtcaggacccccagttcctcatttcgttttatgaaaagatgcagagcgataaaggaagcatccctgatcgattctcagctcaacagttcagtgactatcattctgaactgaacatgagctccttggagctgggggactcagccctgtacttctgtgccagcagtgagcataactaggcttgagtcgacacgagcagtacttcgggccgggcaccaggctcacggtcacaggtgagattcgggcgtctccccaccttccagcccctcggtccccggagtcggagggtgggcataactaggcttgactgatggcgcgagggaggc

SEQ ID NO: 3768 - DNA, 495 bp, Artificial Sequence
  source: /note="Description of Artificial Sequence: Synthetic polynucleotide"
gccttgccagcccgctcagatatgctggacactcttcccacagagcacatagaagctggagttactcagttccccagccacagcgtaatagagaagggccagactgtgactctgagatgtgacccaatttctggacatgataatctttattggtatcgacgtgttatgggaaaagaaataaaatttctgttacattttgtgaaagagtctaaacaggatgagtccggtatgcccaacaatcgattcttagctgaaaggactggagggacgtattctactctgaaggtgcagcctgcagaactggaggattctggagtttatttctgtgccagcagtgaatatgctggacactctgtcgacactgaagctttctttggacaaggcaccagactcacagttgtaggtaagacatttttcaggttcttttgcagatccgtcacagggaaaagtgggtccacagatatgctggacactctctgatggcgcgagggaggc

SEQ ID NO: 3769 - DNA, 495 bp, Artificial Sequence
  source: /note="Description of Artificial Sequence: Synthetic polynucleotide"
gccttgccagcccgctcagatatgctgttcggaactcccacagagcacatagaagctggagttactcagttccccagccacagcgtaatagagaagggccagactgtgactctgagatgtgacccaatttctggacatgataatctttattggtatcgacgtgttatgggaaaagaaataaaatttctgttacattttgtgaaagagtctaaacaggatgagtccggtatgcccaacaatcgattcttagctgaaaggactggagggacgtattctactctgaaggtgcagcctgcagaactggaggattctggagtttatttctgtgccagcagtgaatatgctgttcggaacgtcgactatggctacaccttcggttcggggaccaggttaaccgttgtaggtaaggctgggggtctctaggaggggtgcgatgagggaggactctgtcctgggaaatatatgctgttcggaacctgatggcgcgagggaggc

SEQ ID NO: 3770 - DNA, 495 bp, Artificial Sequence
  source: /note="Description of Artificial Sequence: Synthetic polynucleotide"
gccttgccagcccgctcagatatgctgaagtaacgtcccacagagcacatagaagctggagttactcagttccccagccacagcgtaatagagaagggccagactgtgactctgagatgtgacccaatttctggacatgataatctttattggtatcgacgtgttatgggaaaagaaataaaatttctgttacattttgtgaaagagtctaaacaggatgagtccggtatgcccaacaatcgattcttagctgaaaggactggagggacgtattctactctgaaggtgcagcctgcagaactggaggattctggagtttatttctgtgccagcagtgaatatgctgaagtaacggtcgacgaaacaccatatattttggagagggaagttggctcactgttgtaggtgagtaagtcaaggctggacagctgggaacttgcaaaaaggggctggaatccagatatgctgaagtaacgctgatggcgcgagggaggc

SEQ ID NO: 3771 - DNA, 495 bp, Artificial Sequence
  source: /note="Description of Artificial Sequence: Synthetic polynucleotide"
gccttgccagcccgctcagatatgctggtctcctatcccacagagcacatagaagctggagttactcagttccccagccacagcgtaatagagaagggccagactgtgactctgagatgtgacccaatttctggacatgataatctttattggtatcgacgtgttatgggaaaagaaataaaatttctgttacattttgtgaaagagtctaaacaggatgagtccggtatgcccaacaatcgattcttagctgaaaggactggagggacgtattctactctgaaggtgcagcctgcagaactggaggattctggagtttatttctgtgccagcagtgaatatgctggtctcctagtcgacaatgaaaaactgttttttggcagtggaacccagctctctgtcttgggtatgtaaaagacttctttcgggatagtgtatcataaggtcggagttccaggagatatgctggtctcctactgatggcgcgagggaggc

SEQ ID NO: 3772 - DNA, 495 bp, Artificial Sequence
  source: /note="Description of Artificial Sequence: Synthetic polynucleotide"
gccttgccagcccgctcagatatgctgagagtgtctcccacagagcacatagaagctggagttactcagttccccagccacagcgtaatagagaagggccagactgtgactctgagatgtgacccaatttctggacatgataatctttattggtatcgacgtgttatgggaaaagaaataaaatttctgttacattttgtgaaagagtctaaacaggatgagtccggtatgcccaacaatcgattcttagctgaaaggactggagggacgtattctactctgaaggtgcagcctgcagaactggaggattctggagtttatttctgtgccagcagtgaatatgctgagagtgtcgtcgacatcagccccagcattttggtgatgggactcgactctccatcctaggtaagttgcagaatcagggtggtatggccattgtcccttgaaggcagagttctctatatgctgagagtgtcctgatggcgcgagggaggc

SEQ ID NO: 3773 - DNA, 495 bp, Artificial Sequence
  source: /note="Description of Artificial Sequence: Synthetic polynucleotide"
gccttgccagcccgctcagatatgctggttccgaatcccacagagcacatagaagctggagttactcagttccccagccacagcgtaatagagaagggccagactgtgactctgagatgtgacccaatttctggacatgataatctttattggtatcgacgtgttatgggaaaagaaataaaatttctgttacattttgtgaaagagtctaaacaggatgagtccggtatgcccaacaatcgattcttagctgaaaggactggagggacgtattctactctgaaggtgcagcctgcagaactggaggattctggagtttatttctgtgccagcagtgaatatgctggttccgaagtcgacataattcacccctccactttgggaacgggaccaggctcactgtgacaggtatgggggctccactcttgactcgggggtgcctgggtttgactgcaatgatatatgctggttccgaactgatggcgcgagggaggc

SEQ ID NO: 3774 - DNA, 495 bp, Artificial Sequence
  source: /note="Description of Artificial Sequence: Synthetic polynucleotide"
gccttgccagcccgctcagatatgctgcgttactttcccacagagcacatagaagctggagttactcagttccccagccacagcgtaatagagaagggccagactgtgactctgagatgtgacccaatttctggacatgataatctttattggtatcgacgtgttatgggaaaagaaataaaatttctgttacattttgtgaaagagtctaaacaggatgagtccggtatgcccaacaatcgattcttagctgaaaggactggagggacgtattctactctgaaggtgcagcctgcagaactggaggattctggagtttatttctgtgccagcagtgaatatgctgcgttacttgtcgacacaatgagcagttcttcgggccagggacacggctcaccgtgctaggtaagaagggggctccaggtgggagagagggtgagcagcccagcctgcacgacccatatgctgcgttacttctgatggcgcgagggaggc

SEQ ID NO: 3775 - DNA, 495 bp, Artificial Sequence
  source: /note="Description of Artificial Sequence: Synthetic polynucleotide"
gccttgccagcccgctcagatatgctgtaggagactcccacagagcacatagaagctggagttactcagttccccagccacagcgtaatagagaagggccagactgtgactctgagatgtgacccaatttctggacatgataatctttattggtatcgacgtgttatgggaaaagaaataaaatttctgttacattttgtgaaagagtctaaacaggatgagtccggtatgcccaacaatcgattcttagctgaaaggactggagggacgtattctactctgaaggtgcagcctgcagaactggaggattctggagtttatttctgtgccagcagtgaatatgctgtaggagacgtcgacaccggggagctgttttttggagaaggctctaggctgaccgtactgggtaaggaggcggttggggctccggagagctccgagagggcgggatgggcagaggatatgctgtaggagacctgatggcgcgagggaggc

SEQ ID NO: 3776 - DNA, 495 bp, Artificial Sequence
  source: /note="Description of Artificial Sequence: Synthetic polynucleotide"
gccttgccagcccgctcagatatgctggtgtctactcccacagagcacatagaagctggagttactcagttccccagccacagcgtaatagagaagggccagactgtgactctgagatgtgacccaatttctggacatgataatctttattggtatcgacgtgttatgggaaaagaaataaaatttctgttacattttgtgaaagagtctaaacaggatgagtccggtatgcccaacaatcgattcttagctgaaaggactggagggacgtattctactctgaaggtgcagcctgcagaactggaggattctggagtttatttctgtgccagcagtgaatatgctggtgtctacgtcgacagatacgcagtattttggcccaggcacccggctgacagtgctcggtaagcgggggctcccgctgaagccccggaactggggagggggcgccccgggacgcatatgctggtgtctacctgatggcgcgagggaggc

SEQ ID NO: 3777 - DNA, 495 bp, Artificial Sequence
  source: /note="Description of Artificial Sequence: Synthetic polynucleotide"
gccttgccagcccgctcagatatgctggtacagtgtcccacagagcacatagaagctggagttactcagttccccagccacagcgtaatagagaagggccagactgtgactctgagatgtgacccaatttctggacatgataatctttattggtatcgacgtgttatgggaaaagaaataaaatttctgttacattttgtgaaagagtctaaacaggatgagtccggtatgcccaacaatcgattcttagctgaaaggactggagggacgtattctactctgaaggtgcagcctgcagaactggaggattctggagtttatttctgtgccagcagtgaatatgctggtacagtggtcgacaaaacattcagtacttcggcgccgggacccggctctcagtgctgggtaagctggggccgccgggggaccggggacgagactgcgctcgggtttttgtgcgatatgctggtacagtgctgatggcgcgagggaggc

SEQ ID NO: 3778 - DNA, 495 bp, Artificial Sequence
  source: /note="Description of Artificial Sequence: Synthetic polynucleotide"
gccttgccagcccgctcagatatgctgggatcatctcccacagagcacatagaagctggagttactcagttccccagccacagcgtaatagagaagggccagactgtgactctgagatgtgacccaatttctggacatgataatctttattggtatcgacgtgttatgggaaaagaaataaaatttctgttacattttgtgaaagagtctaaacaggatgagtccggtatgcccaacaatcgattcttagctgaaaggactggagggacgtattctactctgaaggtgcagcctgcagaactggaggattctggagtttatttctgtgccagcagtgaatatgctgggatcatcgtcgacgagacccagtacttcgggccaggcacgcggctcctggtgctcggtgagcgcgggctgctggggcgcgggcgcgggcggcttgggtctggtttttgcggggatatgctgggatcatcctgatggcgcgagggaggc

SEQ ID NO: 3779 - DNA, 495 bp, Artificial Sequence
  source: /note="Description of Artificial Sequence: Synthetic polynucleotide"
gccttgccagcccgctcagatatgctgtattggcgtcccacagagcacatagaagctggagttactcagttccccagccacagcgtaatagagaagggccagactgtgactctgagatgtgacccaatttctggacatgataatctttattggtatcgacgtgttatgggaaaagaaataaaatttctgttacattttgtgaaagagtctaaacaggatgagtccggtatgcccaacaatcgattcttagctgaaaggactggagggacgtattctactctgaaggtgcagcctgcagaactggaggattctggagtttatttctgtgccagcagtgaatatgctgtattggcggtcgacgggccaacgtcctgactttcggggccggcagcaggctgaccgtgctgggtgagttttcgcgggaccacccgggcggcgggattcaggtggaaggcggcggatatgctgtattggcgctgatggcgcgagggaggc

SEQ ID NO: 3780 - DNA, 495 bp, Artificial Sequence
  source: /note="Description of Artificial Sequence: Synthetic polynucleotide"
gccttgccagcccgctcagatatgctgaggcttgatcccacagagcacatagaagctggagttactcagttccccagccacagcgtaatagagaagggccagactgtgactctgagatgtgacccaatttctggacatgataatctttattggtatcgacgtgttatgggaaaagaaataaaatttctgttacattttgtgaaagagtctaaacaggatgagtccggtatgcccaacaatcgattcttagctgaaaggactggagggacgtattctactctgaaggtgcagcctgcagaactggaggattctggagtttatttctgtgccagcagtgaatatgctgaggcttgagtcgacacgagcagtacttcgggccgggcaccaggctcacggtcacaggtgagattcgggcgtctccccaccttccagcccctcggtccccggagtcggagggtggatatgctgaggcttgactgatggcgcgagggaggc

SEQ ID NO: 3781 - DNA, 495 bp, Artificial Sequence
  source: /note="Description of Artificial Sequence: Synthetic polynucleotide"
gccttgccagcccgctcagaatcctgcgacactcttttctctacaggtcatggggatgccatggtcatccagaacccaagataccaggttacccagtttggaaagccagtgaccctgagttgttctcagactttgaaccataacgtcatgtactggtaccagcagaagtcaagtcaggccccaaagctgctgttccactactatgacaaagattttaacaatgaagcagacacccctgataacttccaatccaggaggccgaacacttctttctgctttcttgacatccgctcaccaggcctgggggacacagccatgtacctgtgtgccaccagtgaaatcctgcgacactctgtcgacactgaagctttctttggacaaggcaccagactcacagttgtaggtaagacatttttcaggttcttttgcagatccgtcacagggaaaagtgggtccacagaatcctgcgacactctctgatggcgcgagggaggc

SEQ ID NO: 3782 - DNA, 495 bp, Artificial Sequence
  source: /note="Description of Artificial Sequence: Synthetic polynucleotide"
gccttgccagcccgctcagaatcctgcttcggaactttctctacaggtcatggggatgccatggtcatccagaacccaagataccaggttacccagtttggaaagccagtgaccctgagttgttctcagactttgaaccataacgtcatgtactggtaccagcagaagtcaagtcaggccccaaagctgctgttccactactatgacaaagattttaacaatgaagcagacacccctgataacttccaatccaggaggccgaacacttctttctgctttcttgacatccgctcaccaggcctgggggacacagccatgtacctgtgtgccaccagtgaaatcctgcttcggaacgtcgactatggctacaccttcggttcggggaccaggttaaccgttgtaggtaaggctgggggtctctaggaggggtgcgatgagggaggactctgtcctgggaaataatcctgcttcggaacctgatggcgcgagggaggc

SEQ ID NO: 3783 - DNA, 495 bp, Artificial Sequence
  source: /note="Description of Artificial Sequence: Synthetic polynucleotide"
gccttgccagcccgctcagaatcctgcaagtaacgtttctctacaggtcatggggatgccatggtcatccagaacccaagataccaggttacccagtttggaaagccagtgaccctgagttgttctcagactttgaaccataacgtcatgtactggtaccagcagaagtcaagtcaggccccaaagctgctgttccactactatgacaaagattttaacaatgaagcagacacccctgataacttccaatccaggaggccgaacacttctttctgctttcttgacatccgctcaccaggcctgggggacacagccatgtacctgtgtgccaccagtgaaatcctgcaagtaacggtcgacgaaacaccatatattttggagagggaagttggctcactgttgtaggtgagtaagtcaaggctggacagctgggaacttgcaaaaaggggctggaatccagaatcctgcaagtaacgctgatggcgcgagggaggc

SEQ ID NO: 3784 - DNA, 495 bp, Artificial Sequence
  source: /note="Description of Artificial Sequence: Synthetic polynucleotide"
gccttgccagcccgctcagaatcctgcgtctcctatttctctacaggtcatggggatgccatggtcatccagaacccaagataccaggttacccagtttggaaagccagtgaccctgagttgttctcagactttgaaccataacgtcatgtactggtaccagcagaagtcaagtcaggccccaaagctgctgttccactactatgacaaagattttaacaatgaagcagacacccctgataacttccaatccaggaggccgaacacttctttctgctttcttgacatccgctcaccaggcctgggggacacagccatgtacctgtgtgccaccagtgaaatcctgcgtctcctagtcgacaatgaaaaactgttttttggcagtggaacccagctctctgtcttgggtatgtaaaagacttctttcgggatagtgtatcataaggtcggagttccaggagaatcctgcgtctcctactgatggcgcgagggaggc

SEQ ID NO: 3785 - DNA, 495 bp, Artificial Sequence
  source: /note="Description of Artificial Sequence: Synthetic polynucleotide"
gccttgccagcccgctcagaatcctgcagagtgtctttctctacaggtcatggggatgccatggtcatccagaacccaagataccaggttacccagtttggaaagccagtgaccctgagttgttctcagactttgaaccataacgtcatgtactggtaccagcagaagtcaagtcaggccccaaagctgctgttccactactatgacaaagattttaacaatgaagcagacacccctgataacttccaatccaggaggccgaacacttctttctgctttcttgacatccgctcaccaggcctgggggacacagccatgtacctgtgtgccaccagtgaaatcctgcagagtgtcgtcgacatcagccccagcattttggtgatgggactcgactctccatcctaggtaagttgcagaatcagggtggtatggccattgtcccttgaaggcagagttctctaatcctgcagagtgtcctgatggcgcgagggaggc

SEQ ID NO: 3786 - DNA, 495 bp, Artificial Sequence
  source: /note="Description of Artificial Sequence: Synthetic polynucleotide"
gccttgccagcccgctcagaatcctgcgttccgaatttctctacaggtcatggggatgccatggtcatccagaacccaagataccaggttacccagtttggaaagccagtgaccctgagttgttctcagactttgaaccataacgtcatgtactggtaccagcagaagtcaagtcaggccccaaagctgctgttccactactatgacaaagattttaacaatgaagcagacacccctgataacttccaatccaggaggccgaacacttctttctgctttcttgacatccgctcaccaggcctgggggacacagccatgtacctgtgtgccaccagtgaaatcctgcgttccgaagtcgacataattcacccctccactttgggaacgggaccaggctcactgtgacaggtatgggggctccactcttgactcgggggtgcctgggtttgactgcaatgataatcctgcgttccgaactgatggcgcgagggaggc

SEQ ID NO: 3787 - DNA, 495 bp, Artificial Sequence
  source: /note="Description of Artificial Sequence: Synthetic polynucleotide"
gccttgccagcccgctcagaatcctgccgttactttttctctacaggtcatggggatgccatggtcatccagaacccaagataccaggttacccagtttggaaagccagtgaccctgagttgttctcagactttgaaccataacgtcatgtactggtaccagcagaagtcaagtcaggccccaaagctgctgttccactactatgacaaagattttaacaatgaagcagacacccctgataacttccaatccaggaggccgaacacttctttctgctttcttgacatccgctcaccaggcctgggggacacagccatgtacctgtgtgccaccagtgaaatcctgccgttacttgtcgacacaatgagcagttcttcgggccagggacacggctcaccgtgctaggtaagaagggggctccaggtgggagagagggtgagcagcccagcctgcacgacccaatcctgccgttacttctgatggcgcgagggaggc

SEQ ID NO: 3788 - DNA, 495 bp, Artificial Sequence
  source: /note="Description of Artificial Sequence: Synthetic polynucleotide"
gccttgccagcccgctcagaatcctgctaggagactttctctacaggtcatggggatgccatggtcatccagaacccaagataccaggttacccagtttggaaagccagtgaccctgagttgttctcagactttgaaccataacgtcatgtactggtaccagcagaagtcaagtcaggccccaaagctgctgttccactactatgacaaagattttaacaatgaagcagacacccctgataacttccaatccaggaggccgaacacttctttctgctttcttgacatccgctcaccaggcctgggggacacagccatgtacctgtgtgccaccagtgaaatcctgctaggagacgtcgacaccggggagctgttttttggagaaggctctaggctgaccgtactgggtaaggaggcggttggggctccggagagctccgagagggcgggatgggcagaggaatcctgctaggagacctgatggcgcgagggaggc

SEQ ID NO: 3789 - DNA, 495 bp, Artificial Sequence
  source: /note="Description of Artificial Sequence: Synthetic polynucleotide"
gccttgccagcccgctcagaatcctgcgtgtctactttctctacaggtcatggggatgccatggtcatccagaacccaagataccaggttacccagtttggaaagccagtgaccctgagttgttctcagactttgaaccataacgtcatgtactggtaccagcagaagtcaagtcaggccccaaagctgctgttccactactatgacaaagattttaacaatgaagcagacacccctgataacttccaatccaggaggccgaacacttctttctgctttcttgacatccgctcaccaggcctgggggacacagccatgtacctgtgtgccaccagtgaaatcctgcgtgtctacgtcgacagatacgcagtattttggcccaggcacccggctgacagtgctcggtaagcgggggctcccgctgaagccccggaactggggagggggcgccccgggacgcaatcctgcgtgtctacctgatggcgcgagggaggc

SEQ ID NO: 3790 - DNA, 495 bp, Artificial Sequence
  source: /note="Description of Artificial Sequence: Synthetic polynucleotide"
gccttgccagcccgctcagaatcctgcgtacagtgtttctctacaggtcatggggatgccatggtcatccagaacccaagataccaggttacccagtttggaaagccagtgaccctgagttgttctcagactttgaaccataacgtcatgtactggtaccagcagaagtcaagtcaggccccaaagctgctgttccactactatgacaaagattttaacaatgaagcagacacccctgataacttccaatccaggaggccgaacacttctttctgctttcttgacatccgctcaccaggcctgggggacacagccatgtacctgtgtgccaccagtgaaatcctgcgtacagtggtcgacaaaacattcagtacttcggcgccgggacccggctctcagtgctgggtaagctggggccgccgggggaccggggacgagactgcgctcgggtttttgtgcgaatcctgcgtacagtgctgatggcgcgagggaggc

SEQ ID NO: 3791 - DNA, 495 bp, Artificial Sequence
  source: /note="Description of Artificial Sequence: Synthetic polynucleotide"
gccttgccagcccgctcagaatcctgcggatcatctttctctacaggtcatggggatgccatggtcatccagaacccaagataccaggttacccagtttggaaagccagtgaccctgagttgttctcagactttgaaccataacgtcatgtactggtaccagcagaagtcaagtcaggccccaaagctgctgttccactactatgacaaagattttaacaatgaagcagacacccctgataacttccaatccaggaggccgaacacttctttctgctttcttgacatccgctcaccaggcctgggggacacagccatgtacctgtgtgccaccagtgaaatcctgcggatcatcgtcgacgagacccagtacttcgggccaggcacgcggctcctggtgctcggtgagcgcgggctgctggggcgcgggcgcgggcggcttgggtctggtttttgcggggaatcctgcggatcatcctgatggcgcgagggaggc

SEQ ID NO: 3792 - DNA, 495 bp, Artificial Sequence
  source: /note="Description of Artificial Sequence: Synthetic polynucleotide"
gccttgccagcccgctcagaatcctgctattggcgtttctctacaggtcatggggatgccatggtcatccagaacccaagataccaggttacccagtttggaaagccagtgaccctgagttgttctcagactttgaaccataacgtcatgtactggtaccagcagaagtcaagtcaggccccaaagctgctgttccactactatgacaaagattttaacaatgaagcagacacccctgataacttccaatccaggaggccgaacacttctttctgctttcttgacatccgctcaccaggcctgggggacacagccatgtacctgtgtgccaccagtgaaatcctgctattggcggtcgacgggccaacgtcctgactttcggggccggcagcaggctgaccgtgctgggtgagttttcgcgggaccacccgggcggcgggattcaggtggaaggcggcggaatcctgctattggcgctgatggcgcgagggaggc

SEQ ID NO: 3793 - DNA, 495 bp, Artificial Sequence
  source: /note="Description of Artificial Sequence: Synthetic polynucleotide"
gccttgccagcccgctcagaatcctgcaggcttgatttctctacaggtcatggggatgccatggtcatccagaacccaagataccaggttacccagtttggaaagccagtgaccctgagttgttctcagactttgaaccataacgtcatgtactggtaccagcagaagtcaagtcaggccccaaagctgctgttccactactatgacaaagattttaacaatgaagcagacacccctgataacttccaatccaggaggccgaacacttctttctgctttcttgacatccgctcaccaggcctgggggacacagccatgtacctgtgtgccaccagtgaaatcctgcaggcttgagtcgacacgagcagtacttcgggccgggcaccaggctcacggtcacaggtgagattcgggcgtctccccaccttccagcccctcggtccccggagtcggagggtggaatcctgcaggcttgactgatggcgcgagggaggc

SEQ ID NO: 3794 - DNA, 495 bp, Artificial Sequence
  source: /note="Description of Artificial Sequence: Synthetic polynucleotide"
gccttgccagcccgctcagtgagacctgacactctctttacaggttctcctggtgaagaagtcgcccagactccaaaacatcttgtcagaggggaaggacagaaagcaaaattatattgtgccccaataaaaggacacagttatgttttttggtaccaacaggtcctgaaaaacgagttcaagttcttgatttccttccagaatgaaaatgtctttgatgaaacaggtatgcccaaggaaagattttcagctaagtgcctcccaaattcaccctgtagccttgagatccaggctacgaagcttgaggattcagcagtgtatttttgtgccagcagtgatgagacctgacactctgtcgacactgaagctttctttggacaaggcaccagactcacagttgtaggtaagacatttttcaggttcttttgcagatccgtcacagggaaaagtgggtccacagtgagacctgacactctctgatggcgcgagggaggc

SEQ ID NO: 3795 - DNA, 495 bp, Artificial Sequence
  source: /note="Description of Artificial Sequence: Synthetic polynucleotide"
gccttgccagcccgctcagtgagacctttcggaacctttacaggttctcctggtgaagaagtcgcccagactccaaaacatcttgtcagaggggaaggacagaaagcaaaattatattgtgccccaataaaaggacacagttatgttttttggtaccaacaggtcctgaaaaacgagttcaagttcttgatttccttccagaatgaaaatgtctttgatgaaacaggtatgcccaaggaaagattttcagctaagtgcctcccaaattcaccctgtagccttgagatccaggctacgaagcttgaggattcagcagtgtatttttgtgccagcagtgatgagacctttcggaacgtcgactatggctacaccttcggttcggggaccaggttaaccgttgtaggtaaggctgggggtctctaggaggggtgcgatgagggaggactctgtcctgggaaattgagacctttcggaacctgatggcgcgagggaggc

SEQ ID NO: 3796 - DNA, 495 bp, Artificial Sequence
  source: /note="Description of Artificial Sequence: Synthetic polynucleotide"
gccttgccagcccgctcagtgagacctaagtaacgctttacaggttctcctggtgaagaagtcgcccagactccaaaacatcttgtcagaggggaaggacagaaagcaaaattatattgtgccccaataaaaggacacagttatgttttttggtaccaacaggtcctgaaaaacgagttcaagttcttgatttccttccagaatgaaaatgtctttgatgaaacaggtatgcccaaggaaagattttcagctaagtgcctcccaaattcaccctgtagccttgagatccaggctacgaagcttgaggattcagcagtgtatttttgtgccagcagtgatgagacctaagtaacggtcgacgaaacaccatatattttggagagggaagttggctcactgttgtaggtgagtaagtcaaggctggacagctgggaacttgcaaaaaggggctggaatccagtgagacctaagtaacgctgatggcgcgagggaggc

SEQ ID NO: 3797 - DNA, 495 bp, Artificial Sequence
  source: /note="Description of Artificial Sequence: Synthetic polynucleotide"
gccttgccagcccgctcagtgagacctgtctcctactttacaggttctcctggtgaagaagtcgcccagactccaaaacatcttgtcagaggggaaggacagaaagcaaaattatattgtgccccaataaaaggacacagttatgttttttggtaccaacaggtcctgaaaaacgagttcaagttcttgatttccttccagaatgaaaatgtctttgatgaaacaggtatgcccaaggaaagattttcagctaagtgcctcccaaattcaccctgtagccttgagatccaggctacgaagcttgaggattcagcagtgtatttttgtgccagcagtgatgagacctgtctcctagtcgacaatgaaaaactgttttttggcagtggaacccagctctctgtcttgggtatgtaaaagacttctttcgggatagtgtatcataaggtcggagttccaggagtgagacctgtctcctactgatggcgcgagggaggc

SEQ ID NO: 3798 - DNA, 495 bp, Artificial Sequence
  source: /note="Description of Artificial Sequence: Synthetic polynucleotide"
gccttgccagcccgctcagtgagacctagagtgtcctttacaggttctcctggtgaagaagtcgcccagactccaaaacatcttgtcagaggggaaggacagaaagcaaaattatattgtgccccaataaaaggacacagttatgttttttggtaccaacaggtcctgaaaaacgagttcaagttcttgatttccttccagaatgaaaatgtctttgatgaaacaggtatgcccaaggaaagattttcagctaagtgcctcccaaattcaccctgtagccttgagatccaggctacgaagcttgaggattcagcagtgtatttttgtgccagcagtgatgagacctagagtgtcgtcgacatcagccccagcattttggtgatgggactcgactctccatcctaggtaagttgcagaatcagggtggtatggccattgtcccttgaaggcagagttctcttgagacctagagtgtcctgatggcgcgagggaggc

SEQ ID NO: 3799 - DNA, 495 bp, Artificial Sequence
  source: /note="Description of Artificial Sequence: Synthetic polynucleotide"
gccttgccagcccgctcagtgagacctgttccgaactttacaggttctcctggtgaagaagtcgcccagactccaaaacatcttgtcagaggggaaggacagaaagcaaaattatattgtgccccaataaaaggacacagttatgttttttggtaccaacaggtcctgaaaaacgagttcaagttcttgatttccttccagaatgaaaatgtctttgatgaaacaggtatgcccaaggaaagattttcagctaagtgcctcccaaattcaccctgtagccttgagatccaggctacgaagcttgaggattcagcagtgtatttttgtgccagcagtgatgagacctgttccgaagtcgacataattcacccctccactttgggaacgggaccaggctcactgtgacaggtatgggggctccactcttgactcgggggtgcctgggtttgactgcaatgattgagacctgttccgaactgatggcgcgagggaggc

SEQ ID NO: 3800 - DNA, 495 bp, Artificial Sequence
  source: /note="Description of Artificial Sequence: Synthetic polynucleotide"
gccttgccagcccgctcagtgagacctcgttacttctttacaggttctcctggtgaagaagtcgcccagactccaaaacatcttgtcagaggggaaggacagaaagcaaaattatattgtgccccaataaaaggacacagttatgttttttggtaccaacaggtcctgaaaaacgagttcaagttcttgatttccttccagaatgaaaatgtctttgatgaaacaggtatgcccaaggaaagattttcagctaagtgcctcccaaattcaccctgtagccttgagatccaggctacgaagcttgaggattcagcagtgtatttttgtgccagcagtgatgagacctcgttacttgtcgacacaatgagcagttcttcgggccagggacacggctcaccgtgctaggtaagaagggggctccaggtgggagagagggtgagcagcccagcctgcacgaccctgagacctcgttacttctgatggcgcgagggaggc

SEQ ID NO: 3801 - DNA, 495 bp, Artificial Sequence
  source: /note="Description of Artificial Sequence: Synthetic polynucleotide"
gccttgccagcccgctcagtgagaccttaggagacctttacaggttctcctggtgaagaagtcgcccagactccaaaacatcttgtcagaggggaaggacagaaagcaaaattatattgtgccccaataaaaggacacagttatgttttttggtaccaacaggtcctgaaaaacgagttcaagttcttgatttccttccagaatgaaaatgtctttgatgaaacaggtatgcccaaggaaagattttcagctaagtgcctcccaaattcaccctgtagccttgagatccaggctacgaagcttgaggattcagcagtgtatttttgtgccagcagtgatgagaccttaggagacgtcgacaccggggagctgttttttggagaaggctctaggctgaccgtactgggtaaggaggcggttggggctccggagagctccgagagggcgggatgggcagaggtgagaccttaggagacctgatggcgcgagggaggc

SEQ ID NO: 3802 - DNA, 495 bp, Artificial Sequence
  source: /note="Description of Artificial Sequence: Synthetic polynucleotide"
gccttgccagcccgctcagtgagacctgtgtctacctttacaggttctcctggtgaagaagtcgcccagactccaaaacatcttgtcagaggggaaggacagaaagcaaaattatattgtgccccaataaaaggacacagttatgttttttggtaccaacaggtcctgaaaaacgagttcaagttcttgatttccttccagaatgaaaatgtctttgatgaaacaggtatgcccaaggaaagattttcagctaagtgcctcccaaattcaccctgtagccttgagatccaggctacgaagcttgaggattcagcagtgtatttttgtgccagcagtgatgagacctgtgtctacgtcgacagatacgcagtattttggcccaggcacccggctgacagtgctcggtaagcgggggctcccgctgaagccccggaactggggagggggcgccccgggacgctgagacctgtgtctacctgatggcgcgagggaggc

SEQ ID NO: 3803 - DNA, 495 bp, Artificial Sequence
  source: /note="Description of Artificial Sequence: Synthetic polynucleotide"
gccttgccagcccgctcagtgagacctgtacagtgctttacaggttctcctggtgaagaagtcgcccagactccaaaacatcttgtcagaggggaaggacagaaagcaaaattatattgtgccccaataaaaggacacagttatgttttttggtaccaacaggtcctgaaaaacgagttcaagttcttgatttccttccagaatgaaaatgtctttgatgaaacaggtatgcccaaggaaagattttcagctaagtgcctcccaaattcaccctgtagccttgagatccaggctacgaagcttgaggattcagcagtgtatttttgtgccagcagtgatgagacctgtacagtggtcgacaaaacattcagtacttcggcgccgggacccggctctcagtgctgggtaagctggggccgccgggggaccggggacgagactgcgctcgggtttttgtgcgtgagacctgtacagtgctgatggcgcgagggaggc

SEQ ID NO: 3804 - DNA, 495 bp, Artificial Sequence
  source: /note="Description of Artificial Sequence: Synthetic polynucleotide"
gccttgccagcccgctcagtgagacctggatcatcctttacaggttctcctggtgaagaagtcgcccagactccaaaacatcttgtcagaggggaaggacagaaagcaaaattatattgtgccccaataaaaggacacagttatgttttttggtaccaacaggtcctgaaaaacgagttcaagttcttgatttccttccagaatgaaaatgtctttgatgaaacaggtatgcccaaggaaagattttcagctaagtgcctcccaaattcaccctgtagccttgagatccaggctacgaagcttgaggattcagcagtgtatttttgtgccagcagtgatgagacctggatcatcgtcgacgagacccagtacttcgggccaggcacgcggctcctggtgctcggtgagcgcgggctgctggggcgcgggcgcgggcggcttgggtctggtttttgcggggtgagacctggatcatcctgatggcgcgagggaggc

SEQ ID NO: 3805 - DNA, 495 bp, Artificial Sequence
  source: /note="Description of Artificial Sequence: Synthetic polynucleotide"
gccttgccagcccgctcagtgagaccttattggcgctttacaggttctcctggtgaagaagtcgcccagactccaaaacatcttgtcagaggggaaggacagaaagcaaaattatattgtgccccaataaaaggacacagttatgttttttggtaccaacaggtcctgaaaaacgagttcaagttcttgatttccttccagaatgaaaatgtctttgatgaaacaggtatgcccaaggaaagattttcagctaagtgcctcccaaattcaccctgtagccttgagatccaggctacgaagcttgaggattcagcagtgtatttttgtgccagcagtgatgagaccttattggcggtcgacgggccaacgtcctgactttcggggccggcagcaggctgaccgtgctgggtgagttttcgcgggaccacccgggcggcgggattcaggtggaaggcggcggtgagaccttattggcgctgatggcgcgagggaggc

SEQ ID NO: 3806 - DNA, 495 bp, Artificial Sequence
  source: /note="Description of Artificial Sequence: Synthetic polynucleotide"
gccttgccagcccgctcagtgagacctaggcttgactttacaggttctcctggtgaagaagtcgcccagactccaaaacatcttgtcagaggggaaggacagaaagcaaaattatattgtgccccaataaaaggacacagttatgttttttggtaccaacaggtcctgaaaaacgagttcaagttcttgatttccttccagaatgaaaatgtctttgatgaaacaggtatgcccaaggaaagattttcagctaagtgcctcccaaattcaccctgtagccttgagatccaggctacgaagcttgaggattcagcagtgtatttttgtgccagcagtgatgagacctaggcttgagtcgacacgagcagtacttcgggccgggcaccaggctcacggtcacaggtgagattcgggcgtctccccaccttccagcccctcggtccccggagtcggagggtggtgagacctaggcttgactgatggcgcgagggaggc

SEQ ID NO: 3807 - DNA, 495 bp, Artificial Sequence
  source: /note="Description of Artificial Sequence: Synthetic polynucleotide"
gccttgccagcccgctcaggaatggacgacactctttcttccacaggacactcggagcctggagtcagccagacccccagacacaaggtcaccaacatgggacaggaggtgattctgaggtgcgatccatcttctggtcacatgtttgttcactggtaccgacagaatctgaggcaagaaatgaagttgctgatttccttccagtaccaaaacattgcagttgattcagggatgcccaaggaacgattcacagctgaaagacctaacggaacgtcttccacgctgaagatccatcccgcagagccgagggactcagccgtgtatctctacagtagtgagaatggacgacactctgtcgacactgaagctttctttggacaaggcaccagactcacagttgtaggtaagacatttttcaggttcttttgcagatccgtcacagggaaaagtgggtccacaggaatggacgacactctctgatggcgcgagggaggc

SEQ ID NO: 3808 - DNA, 495 bp, Artificial Sequence
  source: /note="Description of Artificial Sequence: Synthetic polynucleotide"
gccttgccagcccgctcaggaatggacttcggaacttcttccacaggacactcggagcctggagtcagccagacccccagacacaaggtcaccaacatgggacaggaggtgattctgaggtgcgatccatcttctggtcacatgtttgttcactggtaccgacagaatctgaggcaagaaatgaagttgctgatttccttccagtaccaaaacattgcagttgattcagggatgcccaaggaacgattcacagctgaaagacctaacggaacgtcttccacgctgaagatccatcccgcagagccgagggactcagccgtgtatctctacagtagtgagaatggacttcggaacgtcgactatggctacaccttcggttcggggaccaggttaaccgttgtaggtaaggctgggggtctctaggaggggtgcgatgagggaggactctgtcctgggaaatgaatggacttcggaacctgatggcgcgagggaggc

SEQ ID NO: 3809 - DNA, 495 bp, Artificial Sequence
  source: /note="Description of Artificial Sequence: Synthetic polynucleotide"
gccttgccagcccgctcaggaatggacaagtaacgttcttccacaggacactcggagcctggagtcagccagacccccagacacaaggtcaccaacatgggacaggaggtgattctgaggtgcgatccatcttctggtcacatgtttgttcactggtaccgacagaatctgaggcaagaaatgaagttgctgatttccttccagtaccaaaacattgcagttgattcagggatgcccaaggaacgattcacagctgaaagacctaacggaacgtcttccacgctgaagatccatcccgcagagccgagggactcagccgtgtatctctacagtagtgagaatggacaagtaacggtcgacgaaacaccatatattttggagagggaagttggctcactgttgtaggtgagtaagtcaaggctggacagctgggaacttgcaaaaaggggctggaatccaggaatggacaagtaacgctgatggcgcgagggaggc

SEQ ID NO: 3810 - DNA, 495 bp, Artificial Sequence
  source: /note="Description of Artificial Sequence: Synthetic polynucleotide"
gccttgccagcccgctcaggaatggacgtctcctattcttccacaggacactcggagcctggagtcagccagacccccagacacaaggtcaccaacatgggacaggaggtgattctgaggtgcgatccatcttctggtcacatgtttgttcactggtaccgacagaatctgaggcaagaaatgaagttgctgatttccttccagtaccaaaacattgcagttgattcagggatgcccaaggaacgattcacagctgaaagacctaacggaacgtcttccacgctgaagatccatcccgcagagccgagggactcagccgtgtatctctacagtagtgagaatggacgtctcctagtcgacaatgaaaaactgttttttggcagtggaacccagctctctgtcttgggtatgtaaaagacttctttcgggatagtgtatcataaggtcggagttccaggaggaatggacgtctcctactgatggcgcgagggaggc

SEQ ID NO: 3811 - DNA, 495 bp, Artificial Sequence
  source: /note="Description of Artificial Sequence: Synthetic polynucleotide"
gccttgccagcccgctcaggaatggacagagtgtcttcttccacaggacactcggagcctggagtcagccagacccccagacacaaggtcaccaacatgggacaggaggtgattctgaggtgcgatccatcttctggtcacatgtttgttcactggtaccgacagaatctgaggcaagaaatgaagttgctgatttccttccagtaccaaaacattgcagttgattcagggatgcccaaggaacgattcacagctgaaagacctaacggaacgtcttccacgctgaagatccatcccgcagagccgagggactcagccgtgtatctctacagtagtgagaatggacagagtgtcgtcgacatcagccccagcattttggtgatgggactcgactctccatcctaggtaagttgcagaatcagggtggtatggccattgtcccttgaaggcagagttctctgaatggacagagtgtcctgatggcgcgagggaggc

SEQ ID NO: 3812 - DNA, 495 bp, Artificial Sequence
  source: /note="Description of Artificial Sequence: Synthetic polynucleotide"
gccttgccagcccgctcaggaatggacgttccgaattcttccacaggacactcggagcctggagtcagccagacccccagacacaaggtcaccaacatgggacaggaggtgattctgaggtgcgatccatcttctggtcacatgtttgttcactggtaccgacagaatctgaggcaagaaatgaagttgctgatttccttccagtaccaaaacattgcagttgattcagggatgcccaaggaacgattcacagctgaaagacctaacggaacgtcttccacgctgaagatccatcccgcagagccgagggactcagccgtgtatctctacagtagtgagaatggacgttccgaagtcgacataattcacccctccactttgggaacgggaccaggctcactgtgacaggtatgggggctccactcttgactcgggggtgcctgggtttgactgcaatgatgaatggacgttccgaactgatggcgcgagggaggc

SEQ ID NO: 3813 - DNA, 495 bp, Artificial Sequence
  source: /note="Description of Artificial Sequence: Synthetic polynucleotide"
gccttgccagcccgctcaggaatggaccgttacttttcttccacaggacactcggagcctggagtcagccagacccccagacacaaggtcaccaacatgggacaggaggtgattctgaggtgcgatccatcttctggtcacatgtttgttcactggtaccgacagaatctgaggcaagaaatgaagttgctgatttccttccagtaccaaaacattgcagttgattcagggatgcccaaggaacgattcacagctgaaagacctaacggaacgtcttccacgctgaagatccatcccgcagagccgagggactcagccgtgtatctctacagtagtgagaatggaccgttacttgtcgacacaatgagcagttcttcgggccagggacacggctcaccgtgctaggtaagaagggggctccaggtgggagagagggtgagcagcccagcctgcacgacccgaatggaccgttacttctgatggcgcgagggaggc

SEQ ID NO: 3814 - DNA, 495 bp, Artificial Sequence
  source: /note="Description of Artificial Sequence: Synthetic polynucleotide"
gccttgccagcccgctcaggaatggactaggagacttcttccacaggacactcggagcctggagtcagccagacccccagacacaaggtcaccaacatgggacaggaggtgattctgaggtgcgatccatcttctggtcacatgtttgttcactggtaccgacagaatctgaggcaagaaatgaagttgctgatttccttccagtaccaaaacattgcagttgattcagggatgcccaaggaacgattcacagctgaaagacctaacggaacgtcttccacgctgaagatccatcccgcagagccgagggactcagccgtgtatctctacagtagtgagaatggactaggagacgtcgacaccggggagctgttttttggagaaggctctaggctgaccgtactgggtaaggaggcggttggggctccggagagctccgagagggcgggatgggcagagggaatggactaggagacctgatggcgcgagggaggc

SEQ ID NO: 3815 - DNA, 495 bp, Artificial Sequence
  source: /note="Description of Artificial Sequence: Synthetic polynucleotide"
gccttgccagcccgctcaggaatggacgtgtctacttcttccacaggacactcggagcctggagtcagccagacccccagacacaaggtcaccaacatgggacaggaggtgattctgaggtgcgatccatcttctggtcacatgtttgttcactggtaccgacagaatctgaggcaagaaatgaagttgctgatttccttccagtaccaaaacattgcagttgattcagggatgcccaaggaacgattcacagctgaaagacctaacggaacgtcttccacgctgaagatccatcccgcagagccgagggactcagccgtgtatctctacagtagtgagaatggacgtgtctacgtcgacagatacgcagtattttggcccaggcacccggctgacagtgctcggtaagcgggggctcccgctgaagccccggaactggggagggggcgccccgggacgcgaatggacgtgtctacctgatggcgcgagggaggc

SEQ ID NO: 3816 - DNA, 495 bp, Artificial Sequence
  source: /note="Description of Artificial Sequence: Synthetic polynucleotide"
gccttgccagcccgctcaggaatggacgtacagtgttcttccacaggacactcggagcctggagtcagccagacccccagacacaaggtcaccaacatgggacaggaggtgattctgaggtgcgatccatcttctggtcacatgtttgttcactggtaccgacagaatctgaggcaagaaatgaagttgctgatttccttccagtaccaaaacattgcagttgattcagggatgcccaaggaacgattcacagctgaaagacctaacggaacgtcttccacgctgaagatccatcccgcagagccgagggactcagccgtgtatctctacagtagtgagaatggacgtacagtggtcgacaaaacattcagtacttcggcgccgggacccggctctcagtgctgggtaagctggggccgccgggggaccggggacgagactgcgctcgggtttttgtgcggaatggacgtacagtgctgatggcgcgagggaggc

SEQ ID NO: 3817 - DNA, 495 bp, Artificial Sequence
  source: /note="Description of Artificial Sequence: Synthetic polynucleotide"
gccttgccagcccgctcaggaatggacggatcatcttcttccacaggacactcggagcctggagtcagccagacccccagacacaaggtcaccaacatgggacaggaggtgattctgaggtgcgatccatcttctggtcacatgtttgttcactggtaccgacagaatctgaggcaagaaatgaagttgctgatttccttccagtaccaaaacattgcagttgattcagggatgcccaaggaacgattcacagctgaaagacctaacggaacgtcttccacgctgaagatccatcccgcagagccgagggactcagccgtgtatctctacagtagtgagaatggacggatcatcgtcgacgagacccagtacttcgggccaggcacgcggctcctggtgctcggtgagcgcgggctgctggggcgcgggcgcgggcggcttgggtctggtttttgcgggggaatggacggatcatcctgatggcgcgagggaggc

SEQ ID NO: 3818 - DNA, 495 bp, Artificial Sequence
  source: /note="Description of Artificial Sequence: Synthetic polynucleotide"
gccttgccagcccgctcaggaatggactattggcgttcttccacaggacactcggagcctggagtcagccagacccccagacacaaggtcaccaacatgggacaggaggtgattctgaggtgcgatccatcttctggtcacatgtttgttcactggtaccgacagaatctgaggcaagaaatgaagttgctgatttccttccagtaccaaaacattgcagttgattcagggatgcccaaggaacgattcacagctgaaagacctaacggaacgtcttccacgctgaagatccatcccgcagagccgagggactcagccgtgtatctctacagtagtgagaatggactattggcggtcgacgggccaacgtcctgactttcggggccggcagcaggctgaccgtgctgggtgagttttcgcgggaccacccgggcggcgggattcaggtggaaggcggcgggaatggactattggcgctgatggcgcgagggaggc

SEQ ID NO: 3819 - DNA, 495 bp, Artificial Sequence
  source: /note="Description of Artificial Sequence: Synthetic polynucleotide"
gccttgccagcccgctcaggaatggacaggcttgattcttccacaggacactcggagcctggagtcagccagacccccagacacaaggtcaccaacatgggacaggaggtgattctgaggtgcgatccatcttctggtcacatgtttgttcactggtaccgacagaatctgaggcaagaaatgaagttgctgatttccttccagtaccaaaacattgcagttgattcagggatgcccaaggaacgattcacagctgaaagacctaacggaacgtcttccacgctgaagatccatcccgcagagccgagggactcagccgtgtatctctacagtagtgagaatggacaggcttgagtcgacacgagcagtacttcgggccgggcaccaggctcacggtcacaggtgagattcgggcgtctccccaccttccagcccctcggtccccggagtcggagggtgggaatggacaggcttgactgatggcgcgagggaggc

SEQ ID NO: 3820 - DNA, 495 bp, Artificial Sequence
  source: /note="Description of Artificial Sequence: Synthetic polynucleotide"
gccttgccagcccgctcagagttatgcgacactctcctctgaggtctctcaaatgccggcgtcatgcagaacccaagacacctggtcaggaggaggggacaggaggcaagactgagatgcagcccaatgaaaggacacagtcatgtttactggtatcggcagctcccagaggaaggtctgaaattcatggtttatctccagaaagaaaatatcatagatgagtcaggaatgccaaaggaacgattttctgctgaatttcccaaagagggccccagcatcctgaggatccagcaggtagtgcgaggagattcggcagcttatttctgtgccagctctgaagttatgcgacactctgtcgacactgaagctttctttggacaaggcaccagactcacagttgtaggtaagacatttttcaggttcttttgcagatccgtcacagggaaaagtgggtccacagagttatgcgacactctctgatggcgcgagggaggc

SEQ ID NO: 3821 - DNA, 495 bp, Artificial Sequence
  source: /note="Description of Artificial Sequence: Synthetic polynucleotide"
gccttgccagcccgctcagagttatgcttcggaaccctctgaggtctctcaaatgccggcgtcatgcagaacccaagacacctggtcaggaggaggggacaggaggcaagactgagatgcagcccaatgaaaggacacagtcatgtttactggtatcggcagctcccagaggaaggtctgaaattcatggtttatctccagaaagaaaatatcatagatgagtcaggaatgccaaaggaacgattttctgctgaatttcccaaagagggccccagcatcctgaggatccagcaggtagtgcgaggagattcggcagcttatttctgtgccagctctgaagttatgcttcggaacgtcgactatggctacaccttcggttcggggaccaggttaaccgttgtaggtaaggctgggggtctctaggaggggtgcgatgagggaggactctgtcctgggaaatagttatgcttcggaacctgatggcgcgagggaggc

SEQ ID NO: 3822 - DNA, 495 bp, Artificial Sequence
  source: /note="Description of Artificial Sequence: Synthetic polynucleotide"
gccttgccagcccgctcagagttatgcaagtaacgcctctgaggtctctcaaatgccggcgtcatgcagaacccaagacacctggtcaggaggaggggacaggaggcaagactgagatgcagcccaatgaaaggacacagtcatgtttactggtatcggcagctcccagaggaaggtctgaaattcatggtttatctccagaaagaaaatatcatagatgagtcaggaatgccaaaggaacgattttctgctgaatttcccaaagagggccccagcatcctgaggatccagcaggtagtgcgaggagattcggcagcttatttctgtgccagctctgaagttatgcaagtaacggtcgacgaaacaccatatattttggagagggaagttggctcactgttgtaggtgagtaagtcaaggctggacagctgggaacttgcaaaaaggggctggaatccagagttatgcaagtaacgctgatggcgcgagggaggc

SEQ ID NO: 3823 - DNA, 495 bp, Artificial Sequence
  source: /note="Description of Artificial Sequence: Synthetic polynucleotide"
gccttgccagcccgctcagagttatgcgtctcctacctctgaggtctctcaaatgccggcgtcatgcagaacccaagacacctggtcaggaggaggggacaggaggcaagactgagatgcagcccaatgaaaggacacagtcatgtttactggtatcggcagctcccagaggaaggtctgaaattcatggtttatctccagaaagaaaatatcatagatgagtcaggaatgccaaaggaacgattttctgctgaatttcccaaagagggccccagcatcctgaggatccagcaggtagtgcgaggagattcggcagcttatttctgtgccagctctgaagttatgcgtctcctagtcgacaatgaaaaactgttttttggcagtggaacccagctctctgtcttgggtatgtaaaagacttctttcgggatagtgtatcataaggtcggagttccaggagagttatgcgtctcctactgatggcgcgagggaggc

SEQ ID NO: 3824 - DNA, 495 bp, Artificial Sequence
  source: /note="Description of Artificial Sequence: Synthetic polynucleotide"
gccttgccagcccgctcagagttatgcagagtgtccctctgaggtctctcaaatgccggcgtcatgcagaacccaagacacctggtcaggaggaggggacaggaggcaagactgagatgcagcccaatgaaaggacacagtcatgtttactggtatcggcagctcccagaggaaggtctgaaattcatggtttatctccagaaagaaaatatcatagatgagtcaggaatgccaaaggaacgattttctgctgaatttcccaaagagggccccagcatcctgaggatccagcaggtagtgcgaggagattcggcagcttatttctgtgccagctctgaagttatgcagagtgtcgtcgacatcagccccagcattttggtgatgggactcgactctccatcctaggtaagttgcagaatcagggtggtatggccattgtcccttgaaggcagagttctctagttatgcagagtgtcctgatggcgcgagggaggc

SEQ ID NO: 3825 - DNA, 495 bp, Artificial Sequence
  source: /note="Description of Artificial Sequence: Synthetic polynucleotide"
gccttgccagcccgctcagagttatgcgttccgaacctctgaggtctctcaaatgccggcgtcatgcagaacccaagacacctggtcaggaggaggggacaggaggcaagactgagatgcagcccaatgaaaggacacagtcatgtttactggtatcggcagctcccagaggaaggtctgaaattcatggtttatctccagaaagaaaatatcatagatgagtcaggaatgccaaaggaacgattttctgctgaatttcccaaagagggccccagcatcctgaggatccagcaggtagtgcgaggagattcggcagcttatttctgtgccagctctgaagttatgcgttccgaagtcgacataattcacccctccactttgggaacgggaccaggctcactgtgacaggtatgggggctccactcttgactcgggggtgcctgggtttgactgcaatgatagttatgcgttccgaactgatggcgcgagggaggc

SEQ ID NO: 3826 - DNA, 495 bp, Artificial Sequence
  source: /note="Description of Artificial Sequence: Synthetic polynucleotide"
gccttgccagcccgctcagagttatgccgttacttcctctgaggtctctcaaatgccggcgtcatgcagaacccaagacacctggtcaggaggaggggacaggaggcaagactgagatgcagcccaatgaaaggacacagtcatgtttactggtatcggcagctcccagaggaaggtctgaaattcatggtttatctccagaaagaaaatatcatagatgagtcaggaatgccaaaggaacgattttctgctgaatttcccaaagagggccccagcatcctgaggatccagcaggtagtgcgaggagattcggcagcttatttctgtgccagctctgaagttatgccgttacttgtcgacacaatgagcagttcttcgggccagggacacggctcaccgtgctaggtaagaagggggctccaggtgggagagagggtgagcagcccagcctgcacgacccagttatgccgttacttctgatggcgcgagggaggc

SEQ ID NO: 3827 - DNA, 495 bp, Artificial Sequence
  source: /note="Description of Artificial Sequence: Synthetic polynucleotide"
gccttgccagcccgctcagagttatgctaggagaccctctgaggtctctcaaatgccggcgtcatgcagaacccaagacacctggtcaggaggaggggacaggaggcaagactgagatgcagcccaatgaaaggacacagtcatgtttactggtatcggcagctcccagaggaaggtctgaaattcatggtttatctccagaaagaaaatatcatagatgagtcaggaatgccaaaggaacgattttctgctgaatttcccaaagagggccccagcatcctgaggatccagcaggtagtgcgaggagattcggcagcttatttctgtgccagctctgaagttatgctaggagacgtcgacaccggggagctgttttttggagaaggctctaggctgaccgtactgggtaaggaggcggttggggctccggagagctccgagagggcgggatgggcagaggagttatgctaggagacctgatggcgcgagggaggc

SEQ ID NO: 3828 - DNA, 495 bp, Artificial Sequence
  source: /note="Description of Artificial Sequence: Synthetic polynucleotide"
gccttgccagcccgctcagagttatgcgtgtctaccctctgaggtctctcaaatgccggcgtcatgcagaacccaagacacctggtcaggaggaggggacaggaggcaagactgagatgcagcccaatgaaaggacacagtcatgtttactggtatcggcagctcccagaggaaggtctgaaattcatggtttatctccagaaagaaaatatcatagatgagtcaggaatgccaaaggaacgattttctgctgaatttcccaaagagggccccagcatcctgaggatccagcaggtagtgcgaggagattcggcagcttatttctgtgccagctctgaagttatgcgtgtctacgtcgacagatacgcagtattttggcccaggcacccggctgacagtgctcggtaagcgggggctcccgctgaagccccggaactggggagggggcgccccgggacgcagttatgcgtgtctacctgatggcgcgagggaggc

SEQ ID NO: 3829 - DNA, 495 bp, Artificial Sequence
  source: /note="Description of Artificial Sequence: Synthetic polynucleotide"
gccttgccagcccgctcagagttatgcgtacagtgcctctgaggtctctcaaatgccggcgtcatgcagaacccaagacacctggtcaggaggaggggacaggaggcaagactgagatgcagcccaatgaaaggacacagtcatgtttactggtatcggcagctcccagaggaaggtctgaaattcatggtttatctccagaaagaaaatatcatagatgagtcaggaatgccaaaggaacgattttctgctgaatttcccaaagagggccccagcatcctgaggatccagcaggtagtgcgaggagattcggcagcttatttctgtgccagctctgaagttatgcgtacagtggtcgacaaaacattcagtacttcggcgccgggacccggctctcagtgctgggtaagctggggccgccgggggaccggggacgagactgcgctcgggtttttgtgcgagttatgcgtacagtgctgatggcgcgagggaggc

SEQ ID NO: 3830 - DNA, 495 bp, Artificial Sequence
  source: /note="Description of Artificial Sequence: Synthetic polynucleotide"
gccttgccagcccgctcagagttatgcggatcatccctctgaggtctctcaaatgccggcgtcatgcagaacccaagacacctggtcaggaggaggggacaggaggcaagactgagatgcagcccaatgaaaggacacagtcatgtttactggtatcggcagctcccagaggaaggtctgaaattcatggtttatctccagaaagaaaatatcatagatgagtcaggaatgccaaaggaacgattttctgctgaatttcccaaagagggccccagcatcctgaggatccagcaggtagtgcgaggagattcggcagcttatttctgtgccagctctgaagttatgcggatcatcgtcgacgagacccagtacttcgggccaggcacgcggctcctggtgctcggtgagcgcgggctgctggggcgcgggcgcgggcggcttgggtctggtttttgcggggagttatgcggatcatcctgatggcgcgagggaggc

SEQ ID NO: 3831 - DNA, 495 bp, Artificial Sequence
  source: /note="Description of Artificial Sequence: Synthetic polynucleotide"
gccttgccagcccgctcagagttatgctattggcgcctctgaggtctctcaaatgccggcgtcatgcagaacccaagacacctggtcaggaggaggggacaggaggcaagactgagatgcagcccaatgaaaggacacagtcatgtttactggtatcggcagctcccagaggaaggtctgaaattcatggtttatctccagaaagaaaatatcatagatgagtcaggaatgccaaaggaacgattttctgctgaatttcccaaagagggccccagcatcctgaggatccagcaggtagtgcgaggagattcggcagcttatttctgtgccagctctgaagttatgctattggcggtcgacgggccaacgtcctgactttcggggccggcagcaggctgaccgtgctgggtgagttttcgcgggaccacccgggcggcgggattcaggtggaaggcggcggagttatgctattggcgctgatggcgcgagggaggc

SEQ ID NO: 3832 - DNA, 495 bp, Artificial Sequence
  source: /note="Description of Artificial Sequence: Synthetic polynucleotide"
gccttgccagcccgctcagagttatgcaggcttgacctctgaggtctctcaaatgccggcgtcatgcagaacccaagacacctggtcaggaggaggggacaggaggcaagactgagatgcagcccaatgaaaggacacagtcatgtttactggtatcggcagctcccagaggaaggtctgaaattcatggtttatctccagaaagaaaatatcatagatgagtcaggaatgccaaaggaacgattttctgctgaatttcccaaagagggccccagcatcctgaggatccagcaggtagtgcgaggagattcggcagcttatttctgtgccagctctgaagttatgcaggcttgagtcgacacgagcagtacttcgggccgggcaccaggctcacggtcacaggtgagattcgggcgtctccccaccttccagcccctcggtccccggagtcggagggtggagttatgcaggcttgactgatggcgcgagggaggc

SEQ ID NO: 3833 - DNA, 495 bp, Artificial Sequence
  source: /note="Description of Artificial Sequence: Synthetic polynucleotide"
gccttgccagcccgctcagcagcatatgacactctttcttttccagacaccgtggatggtggaatcactcagtccccaaagtacctgttcagaaaggaaggacagaatgtgaccctgagttgtgaacagaatttgaaccacgatgccatgtactggtaccgacaggacccagggcaagggctgagattgatctactactcacagatagtaaatgactttcagaaaggagatatagctgaagggtacagcgtctctcgggagaagaaggaatcctttcctctcactgtgacatcggcccaaaagaacccgacagctttctatctctgtgccagtagtgacagcatatgacactctgtcgacactgaagctttctttggacaaggcaccagactcacagttgtaggtaagacatttttcaggttcttttgcagatccgtcacagggaaaagtgggtccacagcagcatatgacactctctgatggcgcgagggaggc

SEQ ID NO: 3834 - DNA, 495 bp, Artificial Sequence
  source: /note="Description of Artificial Sequence: Synthetic polynucleotide"
gccttgccagcccgctcagcagcatatttcggaacttcttttccagacaccgtggatggtggaatcactcagtccccaaagtacctgttcagaaaggaaggacagaatgtgaccctgagttgtgaacagaatttgaaccacgatgccatgtactggtaccgacaggacccagggcaagggctgagattgatctactactcacagatagtaaatgactttcagaaaggagatatagctgaagggtacagcgtctctcgggagaagaaggaatcctttcctctcactgtgacatcggcccaaaagaacccgacagctttctatctctgtgccagtagtgacagcatatttcggaacgtcgactatggctacaccttcggttcggggaccaggttaaccgttgtaggtaaggctgggggtctctaggaggggtgcgatgagggaggactctgtcctgggaaatcagcatatttcggaacctgatggcgcgagggaggc

SEQ ID NO: 3835 - DNA, 495 bp, Artificial Sequence
  source: /note="Description of Artificial Sequence: Synthetic polynucleotide"
gccttgccagcccgctcagcagcatataagtaacgttcttttccagacaccgtggatggtggaatcactcagtccccaaagtacctgttcagaaaggaaggacagaatgtgaccctgagttgtgaacagaatttgaaccacgatgccatgtactggtaccgacaggacccagggcaagggctgagattgatctactactcacagatagtaaatgactttcagaaaggagatatagctgaagggtacagcgtctctcgggagaagaaggaatcctttcctctcactgtgacatcggcccaaaagaacccgacagctttctatctctgtgccagtagtgacagcatataagtaacggtcgacgaaacaccatatattttggagagggaagttggctcactgttgtaggtgagtaagtcaaggctggacagctgggaacttgcaaaaaggggctggaatccagcagcatataagtaacgctgatggcgcgagggaggc

SEQ ID NO: 3836 - DNA, 495 bp, Artificial Sequence
  source: /note="Description of Artificial Sequence: Synthetic polynucleotide"
gccttgccagcccgctcagcagcatatgtctcctattcttttccagacaccgtggatggtggaatcactcagtccccaaagtacctgttcagaaaggaaggacagaatgtgaccctgagttgtgaacagaatttgaaccacgatgccatgtactggtaccgacaggacccagggcaagggctgagattgatctactactcacagatagtaaatgactttcagaaaggagatatagctgaagggtacagcgtctctcgggagaagaaggaatcctttcctctcactgtgacatcggcccaaaagaacccgacagctttctatctctgtgccagtagtgacagcatatgtctcctagtcgacaatgaaaaactgttttttggcagtggaacccagctctctgtcttgggtatgtaaaagacttctttcgggatagtgtatcataaggtcggagttccaggagcagcatatgtctcctactgatggcgcgagggaggc

SEQ ID NO: 3837 - DNA, 495 bp, Artificial Sequence
  source: /note="Description of Artificial Sequence: Synthetic polynucleotide"
gccttgccagcccgctcagcagcatatagagtgtcttcttttccagacaccgtggatggtggaatcactcagtccccaaagtacctgttcagaaaggaaggacagaatgtgaccctgagttgtgaacagaatttgaaccacgatgccatgtactggtaccgacaggacccagggcaagggctgagattgatctactactcacagatagtaaatgactttcagaaaggagatatagctgaagggtacagcgtctctcgggagaagaaggaatcctttcctctcactgtgacatcggcccaaaagaacccgacagctttctatctctgtgccagtagtgacagcatatagagtgtcgtcgacatcagccccagcattttggtgatgggactcgactctccatcctaggtaagttgcagaatcagggtggtatggccattgtcccttgaaggcagagttctctcagcatatagagtgtcctgatggcgcgagggaggc

SEQ ID NO: 3838 - DNA, 495 bp, Artificial Sequence
  source: /note="Description of Artificial Sequence: Synthetic polynucleotide"
gccttgccagcccgctcagcagcatatgttccgaattcttttccagacaccgtggatggtggaatcactcagtccccaaagtacctgttcagaaaggaaggacagaatgtgaccctgagttgtgaacagaatttgaaccacgatgccatgtactggtaccgacaggacccagggcaagggctgagattgatctactactcacagatagtaaatgactttcagaaaggagatatagctgaagggtacagcgtctctcgggagaagaaggaatcctttcctctcactgtgacatcggcccaaaagaacccgacagctttctatctctgtgccagtagtgacagcatatgttccgaagtcgacataattcacccctccactttgggaacgggaccaggctcactgtgacaggtatgggggctccactcttgactcgggggtgcctgggtttgactgcaatgatcagcatatgttccgaactgatggcgcgagggaggc

SEQ ID NO: 3839 - DNA, 495 bp, Artificial Sequence
  source: /note="Description of Artificial Sequence: Synthetic polynucleotide"
gccttgccagcccgctcagcagcatatcgttacttttcttttccagacaccgtggatggtggaatcactcagtccccaaagtacctgttcagaaaggaaggacagaatgtgaccctgagttgtgaacagaatttgaaccacgatgccatgtactggtaccgacaggacccagggcaagggctgagattgatctactactcacagatagtaaatgactttcagaaaggagatatagctgaagggtacagcgtctctcgggagaagaaggaatcctttcctctcactgtgacatcggcccaaaagaacccgacagctttctatctctgtgccagtagtgacagcatatcgttacttgtcgacacaatgagcagttcttcgggccagggacacggctcaccgtgctaggtaagaagggggctccaggtgggagagagggtgagcagcccagcctgcacgaccccagcatatcgttacttctgatggcgcgagggaggc

SEQ ID NO: 3840 - DNA, 495 bp, Artificial Sequence
  source: /note="Description of Artificial Sequence: Synthetic polynucleotide"
gccttgccagcccgctcagcagcatattaggagacttcttttccagacaccgtggatggtggaatcactcagtccccaaagtacctgttcagaaaggaaggacagaatgtgaccctgagttgtgaacagaatttgaaccacgatgccatgtactggtaccgacaggacccagggcaagggctgagattgatctactactcacagatagtaaatgactttcagaaaggagatatagctgaagggtacagcgtctctcgggagaagaaggaatcctttcctctcactgtgacatcggcccaaaagaacccgacagctttctatctctgtgccagtagtgacagcatattaggagacgtcgacaccggggagctgttttttggagaaggctctaggctgaccgtactgggtaaggaggcggttggggctccggagagctccgagagggcgggatgggcagaggcagcatattaggagacctgatggcgcgagggaggc

SEQ ID NO: 3841 - DNA, 495 bp, Artificial Sequence
  source: /note="Description of Artificial Sequence: Synthetic polynucleotide"
gccttgccagcccgctcagcagcatatgtgtctacttcttttccagacaccgtggatggtggaatcactcagtccccaaagtacctgttcagaaaggaaggacagaatgtgaccctgagttgtgaacagaatttgaaccacgatgccatgtactggtaccgacaggacccagggcaagggctgagattgatctactactcacagatagtaaatgactttcagaaaggagatatagctgaagggtacagcgtctctcgggagaagaaggaatcctttcctctcactgtgacatcggcccaaaagaacccgacagctttctatctctgtgccagtagtgacagcatatgtgtctacgtcgacagatacgcagtattttggcccaggcacccggctgacagtgctcggtaagcgggggctcccgctgaagccccggaactggggagggggcgccccgggacgccagcatatgtgtctacctgatggcgcgagggaggc

SEQ ID NO: 3842 - DNA, 495 bp, Artificial Sequence
  source: /note="Description of Artificial Sequence: Synthetic polynucleotide"
gccttgccagcccgctcagcagcatatgtacagtgttcttttccagacaccgtggatggtggaatcactcagtccccaaagtacctgttcagaaaggaaggacagaatgtgaccctgagttgtgaacagaatttgaaccacgatgccatgtactggtaccgacaggacccagggcaagggctgagattgatctactactcacagatagtaaatgactttcagaaaggagatatagctgaagggtacagcgtctctcgggagaagaaggaatcctttcctctcactgtgacatcggcccaaaagaacccgacagctttctatctctgtgccagtagtgacagcatatgtacagtggtcgacaaaacattcagtacttcggcgccgggacccggctctcagtgctgggtaagctggggccgccgggggaccggggacgagactgcgctcgggtttttgtgcgcagcatatgtacagtgctgatggcgcgagggaggc

SEQ ID NO: 3843 - DNA, 495 bp, Artificial Sequence
  source: /note="Description of Artificial Sequence: Synthetic polynucleotide"
gccttgccagcccgctcagcagcatatggatcatcttcttttccagacaccgtggatggtggaatcactcagtccccaaagtacctgttcagaaaggaaggacagaatgtgaccctgagttgtgaacagaatttgaaccacgatgccatgtactggtaccgacaggacccagggcaagggctgagattgatctactactcacagatagtaaatgactttcagaaaggagatatagctgaagggtacagcgtctctcgggagaagaaggaatcctttcctctcactgtgacatcggcccaaaagaacccgacagctttctatctctgtgccagtagtgacagcatatggatcatcgtcgacgagacccagtacttcgggccaggcacgcggctcctggtgctcggtgagcgcgggctgctggggcgcgggcgcgggcggcttgggtctggtttttgcggggcagcatatggatcatcctgatggcgcgagggaggc

SEQ ID NO: 3844 - DNA, 495 bp, Artificial Sequence
  source: /note="Description of Artificial Sequence: Synthetic polynucleotide"
gccttgccagcccgctcagcagcatattattggcgttcttttccagacaccgtggatggtggaatcactcagtccccaaagtacctgttcagaaaggaaggacagaatgtgaccctgagttgtgaacagaatttgaaccacgatgccatgtactggtaccgacaggacccagggcaagggctgagattgatctactactcacagatagtaaatgactttcagaaaggagatatagctgaagggtacagcgtctctcgggagaagaaggaatcctttcctctcactgtgacatcggcccaaaagaacccgacagctttctatctctgtgccagtagtgacagcatattattggcggtcgacgggccaacgtcctgactttcggggccggcagcaggctgaccgtgctgggtgagttttcgcgggaccacccgggcggcgggattcaggtggaaggcggcggcagcatattattggcgctgatggcgcgagggaggc

SEQ ID NO: 3845 - DNA, 495 bp, Artificial Sequence
  source: /note="Description of Artificial Sequence: Synthetic polynucleotide"
gccttgccagcccgctcagcagcatataggcttgattcttttccagacaccgtggatggtggaatcactcagtccccaaagtacctgttcagaaaggaaggacagaatgtgaccctgagttgtgaacagaatttgaaccacgatgccatgtactggtaccgacaggacccagggcaagggctgagattgatctactactcacagatagtaaatgactttcagaaaggagatatagctgaagggtacagcgtctctcgggagaagaaggaatcctttcctctcactgtgacatcggcccaaaagaacccgacagctttctatctctgtgccagtagtgacagcatataggcttgagtcgacacgagcagtacttcgggccgggcaccaggctcacggtcacaggtgagattcgggcgtctccccaccttccagcccctcggtccccggagtcggagggtggcagcatataggcttgactgatggcgcgagggaggc

SEQ ID NO: 3846 - DNA, 495 bp, Artificial Sequence
  source: /note="Description of Artificial Sequence: Synthetic polynucleotide"
gccttgccagcccgctcaggcaggattgacactctaggctccgggcttggtgctgtcgtctctcaacatccgagctgggttatctgtaagagtggaacctctgtgaagatcgagtgccgttccctggactttcaggccacaactatgttttggtatcgtcagttcccgaaacagagtctcatgctgatggcaacttccaatgagggctccaaggccacatacgagcaaggcgtcgagaaggacaagtttctcatcaaccatgcaagcctgaccttgtccactctgacagtgaccagtgcccatcctgaagacagcagcttctacatctgcagtgctgagcaggattgacactctgtcgacactgaagctttctttggacaaggcaccagactcacagttgtaggtaagacatttttcaggttcttttgcagatccgtcacagggaaaagtgggtccacaggcaggattgacactctctgatggcgcgagggaggc

SEQ ID NO: 3847 - DNA, 495 bp, Artificial Sequence
  source: /note="Description of Artificial Sequence: Synthetic polynucleotide"
gccttgccagcccgctcaggcaggattttcggaacaggctccgggcttggtgctgtcgtctctcaacatccgagctgggttatctgtaagagtggaacctctgtgaagatcgagtgccgttccctggactttcaggccacaactatgttttggtatcgtcagttcccgaaacagagtctcatgctgatggcaacttccaatgagggctccaaggccacatacgagcaaggcgtcgagaaggacaagtttctcatcaaccatgcaagcctgaccttgtccactctgacagtgaccagtgcccatcctgaagacagcagcttctacatctgcagtgctgagcaggattttcggaacgtcgactatggctacaccttcggttcggggaccaggttaaccgttgtaggtaaggctgggggtctctaggaggggtgcgatgagggaggactctgtcctgggaaatgcaggattttcggaacctgatggcgcgagggaggc

SEQ ID NO: 3848 - DNA, 495 bp, Artificial Sequence
  source: /note="Description of Artificial Sequence: Synthetic polynucleotide"
gccttgccagcccgctcaggcaggattaagtaacgaggctccgggcttggtgctgtcgtctctcaacatccgagctgggttatctgtaagagtggaacctctgtgaagatcgagtgccgttccctggactttcaggccacaactatgttttggtatcgtcagttcccgaaacagagtctcatgctgatggcaacttccaatgagggctccaaggccacatacgagcaaggcgtcgagaaggacaagtttctcatcaaccatgcaagcctgaccttgtccactctgacagtgaccagtgcccatcctgaagacagcagcttctacatctgcagtgctgagcaggattaagtaacggtcgacgaaacaccatatattttggagagggaagttggctcactgttgtaggtgagtaagtcaaggctggacagctgggaacttgcaaaaaggggctggaatccaggcaggattaagtaacgctgatggcgcgagggaggc

SEQ ID NO: 3849 - DNA, 495 bp, Artificial Sequence
  source: /note="Description of Artificial Sequence: Synthetic polynucleotide"
gccttgccagcccgctcaggcaggattgtctcctaaggctccgggcttggtgctgtcgtctctcaacatccgagctgggttatctgtaagagtggaacctctgtgaagatcgagtgccgttccctggactttcaggccacaactatgttttggtatcgtcagttcccgaaacagagtctcatgctgatggcaacttccaatgagggctccaaggccacatacgagcaaggcgtcgagaaggacaagtttctcatcaaccatgcaagcctgaccttgtccactctgacagtgaccagtgcccatcctgaagacagcagcttctacatctgcagtgctgagcaggattgtctcctagtcgacaatgaaaaactgttttttggcagtggaacccagctctctgtcttgggtatgtaaaagacttctttcgggatagtgtatcataaggtcggagttccaggaggcaggattgtctcctactgatggcgcgagggaggc

SEQ ID NO: 3850 - DNA, 495 bp, Artificial Sequence
  source: /note="Description of Artificial Sequence: Synthetic polynucleotide"
gccttgccagcccgctcaggcaggattagagtgtcaggctccgggcttggtgctgtcgtctctcaacatccgagctgggttatctgtaagagtggaacctctgtgaagatcgagtgccgttccctggactttcaggccacaactatgttttggtatcgtcagttcccgaaacagagtctcatgctgatggcaacttccaatgagggctccaaggccacatacgagcaaggcgtcgagaaggacaagtttctcatcaaccatgcaagcctgaccttgtccactctgacagtgaccagtgcccatcctgaagacagcagcttctacatctgcagtgctgagcaggattagagtgtcgtcgacatcagccccagcattttggtgatgggactcgactctccatcctaggtaagttgcagaatcagggtggtatggccattgtcccttgaaggcagagttctctgcaggattagagtgtcctgatggcgcgagggaggc

SEQ ID NO: 3851 - DNA, 495 bp, Artificial Sequence
  source: /note="Description of Artificial Sequence: Synthetic polynucleotide"
gccttgccagcccgctcaggcaggattgttccgaaaggctccgggcttggtgctgtcgtctctcaacatccgagctgggttatctgtaagagtggaacctctgtgaagatcgagtgccgttccctggactttcaggccacaactatgttttggtatcgtcagttcccgaaacagagtctcatgctgatggcaacttccaatgagggctccaaggccacatacgagcaaggcgtcgagaaggacaagtttctcatcaaccatgcaagcctgaccttgtccactctgacagtgaccagtgcccatcctgaagacagcagcttctacatctgcagtgctgagcaggattgttccgaagtcgacataattcacccctccactttgggaacgggaccaggctcactgtgacaggtatgggggctccactcttgactcgggggtgcctgggtttgactgcaatgatgcaggattgttccgaactgatggcgcgagggaggc

SEQ ID NO: 3852 - DNA, 495 bp, Artificial Sequence
  source: /note="Description of Artificial Sequence: Synthetic polynucleotide"
gccttgccagcccgctcaggcaggattcgttacttaggctccgggcttggtgctgtcgtctctcaacatccgagctgggttatctgtaagagtggaacctctgtgaagatcgagtgccgttccctggactttcaggccacaactatgttttggtatcgtcagttcccgaaacagagtctcatgctgatggcaacttccaatgagggctccaaggccacatacgagcaaggcgtcgagaaggacaagtttctcatcaaccatgcaagcctgaccttgtccactctgacagtgaccagtgcccatcctgaagacagcagcttctacatctgcagtgctgagcaggattcgttacttgtcgacacaatgagcagttcttcgggccagggacacggctcaccgtgctaggtaagaagggggctccaggtgggagagagggtgagcagcccagcctgcacgacccgcaggattcgttacttctgatggcgcgagggaggc

SEQ ID NO: 3853 - DNA, 495 bp, Artificial Sequence
  source: /note="Description of Artificial Sequence: Synthetic polynucleotide"
gccttgccagcccgctcaggcaggatttaggagacaggctccgggcttggtgctgtcgtctctcaacatccgagctgggttatctgtaagagtggaacctctgtgaagatcgagtgccgttccctggactttcaggccacaactatgttttggtatcgtcagttcccgaaacagagtctcatgctgatggcaacttccaatgagggctccaaggccacatacgagcaaggcgtcgagaaggacaagtttctcatcaaccatgcaagcctgaccttgtccactctgacagtgaccagtgcccatcctgaagacagcagcttctacatctgcagtgctgagcaggatttaggagacgtcgacaccggggagctgttttttggagaaggctctaggctgaccgtactgggtaaggaggcggttggggctccggagagctccgagagggcgggatgggcagagggcaggatttaggagacctgatggcgcgagggaggc

SEQ ID NO: 3854 - DNA, 495 bp, Artificial Sequence
  source: /note="Description of Artificial Sequence: Synthetic polynucleotide"
gccttgccagcccgctcaggcaggattgtgtctacaggctccgggcttggtgctgtcgtctctcaacatccgagctgggttatctgtaagagtggaacctctgtgaagatcgagtgccgttccctggactttcaggccacaactatgttttggtatcgtcagttcccgaaacagagtctcatgctgatggcaacttccaatgagggctccaaggccacatacgagcaaggcgtcgagaaggacaagtttctcatcaaccatgcaagcctgaccttgtccactctgacagtgaccagtgcccatcctgaagacagcagcttctacatctgcagtgctgagcaggattgtgtctacgtcgacagatacgcagtattttggcccaggcacccggctgacagtgctcggtaagcgggggctcccgctgaagccccggaactggggagggggcgccccgggacgcgcaggattgtgtctacctgatggcgcgagggaggc

SEQ ID NO: 3855 - DNA, 495 bp, Artificial Sequence
  source: /note="Description of Artificial Sequence: Synthetic polynucleotide"
gccttgccagcccgctcaggcaggattgtacagtgaggctccgggcttggtgctgtcgtctctcaacatccgagctgggttatctgtaagagtggaacctctgtgaagatcgagtgccgttccctggactttcaggccacaactatgttttggtatcgtcagttcccgaaacagagtctcatgctgatggcaacttccaatgagggctccaaggccacatacgagcaaggcgtcgagaaggacaagtttctcatcaaccatgcaagcctgaccttgtccactctgacagtgaccagtgcccatcctgaagacagcagcttctacatctgcagtgctgagcaggattgtacagtggtcgacaaaacattcagtacttcggcgccgggacccggctctcagtgctgggtaagctggggccgccgggggaccggggacgagactgcgctcgggtttttgtgcggcaggattgtacagtgctgatggcgcgagggaggc

SEQ ID NO: 3856 - DNA, 495 bp, Artificial Sequence
  source: /note="Description of Artificial Sequence: Synthetic polynucleotide"
gccttgccagcccgctcaggcaggattggatcatcaggctccgggcttggtgctgtcgtctctcaacatccgagctgggttatctgtaagagtggaacctctgtgaagatcgagtgccgttccctggactttcaggccacaactatgttttggtatcgtcagttcccgaaacagagtctcatgctgatggcaacttccaatgagggctccaaggccacatacgagcaaggcgtcgagaaggacaagtttctcatcaaccatgcaagcctgaccttgtccactctgacagtgaccagtgcccatcctgaagacagcagcttctacatctgcagtgctgagcaggattggatcatcgtcgacgagacccagtacttcgggccaggcacgcggctcctggtgctcggtgagcgcgggctgctggggcgcgggcgcgggcggcttgggtctggtttttgcgggggcaggattggatcatcctgatggcgcgagggaggc

SEQ ID NO: 3857 - DNA, 495 bp, Artificial Sequence
  source: /note="Description of Artificial Sequence: Synthetic polynucleotide"
gccttgccagcccgctcaggcaggatttattggcgaggctccgggcttggtgctgtcgtctctcaacatccgagctgggttatctgtaagagtggaacctctgtgaagatcgagtgccgttccctggactttcaggccacaactatgttttggtatcgtcagttcccgaaacagagtctcatgctgatggcaacttccaatgagggctccaaggccacatacgagcaaggcgtcgagaaggacaagtttctcatcaaccatgcaagcctgaccttgtccactctgacagtgaccagtgcccatcctgaagacagcagcttctacatctgcagtgctgagcaggatttattggcggtcgacgggccaacgtcctgactttcggggccggcagcaggctgaccgtgctgggtgagttttcgcgggaccacccgggcggcgggattcaggtggaaggcggcgggcaggatttattggcgctgatggcgcgagggaggc

SEQ ID NO: 3858 - DNA, 495 bp, Artificial Sequence
  source: /note="Description of Artificial Sequence: Synthetic polynucleotide"
gccttgccagcccgctcaggcaggattaggcttgaaggctccgggcttggtgctgtcgtctctcaacatccgagctgggttatctgtaagagtggaacctctgtgaagatcgagtgccgttccctggactttcaggccacaactatgttttggtatcgtcagttcccgaaacagagtctcatgctgatggcaacttccaatgagggctccaaggccacatacgagcaaggcgtcgagaaggacaagtttctcatcaaccatgcaagcctgaccttgtccactctgacagtgaccagtgcccatcctgaagacagcagcttctacatctgcagtgctgagcaggattaggcttgagtcgacacgagcagtacttcgggccgggcaccaggctcacggtcacaggtgagattcgggcgtctccccaccttccagcccctcggtccccggagtcggagggtgggcaggattaggcttgactgatggcgcgagggaggc

SEQ ID NO: 3859 - DNA, 495 bp, Artificial Sequence
  source: /note="Description of Artificial Sequence: Synthetic polynucleotide"
gccttgccagcccgctcagaggtctcagacactctctccacaggctccacggacaccaaggtcacccagagacctagacttctggtcaaagcaagtgaacagaaagcaaagatggattgtgttcctataaaagcacatagttatgtttactggtatcgtaagaagctggaagaagagctcaagtttttggtttactttcagaatgaagaacttattcagaaagcagaaataatcaatgagcgatttttagcccaatgctccaaaaactcatcctgtaccttggagatccagtccacggagtcaggggacacagcactgtatttctgtgccagcagtgaaggtctcagacactctgtcgacactgaagctttctttggacaaggcaccagactcacagttgtaggtaagacatttttcaggttcttttgcagatccgtcacagggaaaagtgggtccacagaggtctcagacactctctgatggcgcgagggaggc

SEQ ID NO: 3860 - DNA, 495 bp, Artificial Sequence
  source: /note="Description of Artificial Sequence: Synthetic polynucleotide"
gccttgccagcccgctcagaggtctcattcggaacctccacaggctccacggacaccaaggtcacccagagacctagacttctggtcaaagcaagtgaacagaaagcaaagatggattgtgttcctataaaagcacatagttatgtttactggtatcgtaagaagctggaagaagagctcaagtttttggtttactttcagaatgaagaacttattcagaaagcagaaataatcaatgagcgatttttagcccaatgctccaaaaactcatcctgtaccttggagatccagtccacggagtcaggggacacagcactgtatttctgtgccagcagtgaaggtctcattcggaacgtcgactatggctacaccttcggttcggggaccaggttaaccgttgtaggtaaggctgggggtctctaggaggggtgcgatgagggaggactctgtcctgggaaataggtctcattcggaacctgatggcgcgagggaggc

SEQ ID NO: 3861 - DNA, 495 bp, Artificial Sequence
  source: /note="Description of Artificial Sequence: Synthetic polynucleotide"
gccttgccagcccgctcagaggtctcaaagtaacgctccacaggctccacggacaccaaggtcacccagagacctagacttctggtcaaagcaagtgaacagaaagcaaagatggattgtgttcctataaaagcacatagttatgtttactggtatcgtaagaagctggaagaagagctcaagtttttggtttactttcagaatgaagaacttattcagaaagcagaaataatcaatgagcgatttttagcccaatgctccaaaaactcatcctgtaccttggagatccagtccacggagtcaggggacacagcactgtatttctgtgccagcagtgaaggtctcaaagtaacggtcgacgaaacaccatatattttggagagggaagttggctcactgttgtaggtgagtaagtcaaggctggacagctgggaacttgcaaaaaggggctggaatccagaggtctcaaagtaacgctgatggcgcgagggaggc

SEQ ID NO: 3862 - DNA, 495 bp, Artificial Sequence
  source: /note="Description of Artificial Sequence: Synthetic polynucleotide"
gccttgccagcccgctcagaggtctcagtctcctactccacaggctccacggacaccaaggtcacccagagacctagacttctggtcaaagcaagtgaacagaaagcaaagatggattgtgttcctataaaagcacatagttatgtttactggtatcgtaagaagctggaagaagagctcaagtttttggtttactttcagaatgaagaacttattcagaaagcagaaataatcaatgagcgatttttagcccaatgctccaaaaactcatcctgtaccttggagatccagtccacggagtcaggggacacagcactgtatttctgtgccagcagtgaaggtctcagtctcctagtcgacaatgaaaaactgttttttggcagtggaacccagctctctgtcttgggtatgtaaaagacttctttcgggatagtgtatcataaggtcggagttccaggagaggtctcagtctcctactgatggcgcgagggaggc

SEQ ID NO: 3863 - DNA, 495 bp, Artificial Sequence
  source: /note="Description of Artificial Sequence: Synthetic polynucleotide"
gccttgccagcccgctcagaggtctcaagagtgtcctccacaggctccacggacaccaaggtcacccagagacctagacttctggtcaaagcaagtgaacagaaagcaaagatggattgtgttcctataaaagcacatagttatgtttactggtatcgtaagaagctggaagaagagctcaagtttttggtttactttcagaatgaagaacttattcagaaagcagaaataatcaatgagcgatttttagcccaatgctccaaaaactcatcctgtaccttggagatccagtccacggagtcaggggacacagcactgtatttctgtgccagcagtgaaggtctcaagagtgtcgtcgacatcagccccagcattttggtgatgggactcgactctccatcctaggtaagttgcagaatcagggtggtatggccattgtcccttgaaggcagagttctctaggtctcaagagtgtcctgatggcgcgagggaggc

SEQ ID NO: 3864 - DNA, 495 bp, Artificial Sequence
  source: /note="Description of Artificial Sequence: Synthetic polynucleotide"
gccttgccagcccgctcagaggtctcagttccgaactccacaggctccacggacaccaaggtcacccagagacctagacttctggtcaaagcaagtgaacagaaagcaaagatggattgtgttcctataaaagcacatagttatgtttactggtatcgtaagaagctggaagaagagctcaagtttttggtttactttcagaatgaagaacttattcagaaagcagaaataatcaatgagcgatttttagcccaatgctccaaaaactcatcctgtaccttggagatccagtccacggagtcaggggacacagcactgtatttctgtgccagcagtgaaggtctcagttccgaagtcgacataattcacccctccactttgggaacgggaccaggctcactgtgacaggtatgggggctccactcttgactcgggggtgcctgggtttgactgcaatgataggtctcagttccgaactgatggcgcgagggaggc

SEQ ID NO: 3865 - DNA, 495 bp, Artificial Sequence
  source: /note="Description of Artificial Sequence: Synthetic polynucleotide"
gccttgccagcccgctcagaggtctcacgttacttctccacaggctccacggacaccaaggtcacccagagacctagacttctggtcaaagcaagtgaacagaaagcaaagatggattgtgttcctataaaagcacatagttatgtttactggtatcgtaagaagctggaagaagagctcaagtttttggtttactttcagaatgaagaacttattcagaaagcagaaataatcaatgagcgatttttagcccaatgctccaaaaactcatcctgtaccttggagatccagtccacggagtcaggggacacagcactgtatttctgtgccagcagtgaaggtctcacgttacttgtcgacacaatgagcagttcttcgggccagggacacggctcaccgtgctaggtaagaagggggctccaggtgggagagagggtgagcagcccagcctgcacgacccaggtctcacgttacttctgatggcgcgagggaggc

SEQ ID NO: 3866 - DNA, 495 bp, Artificial Sequence
  source: /note="Description of Artificial Sequence: Synthetic polynucleotide"
gccttgccagcccgctcagaggtctcataggagacctccacaggctccacggacaccaaggtcacccagagacctagacttctggtcaaagcaagtgaacagaaagcaaagatggattgtgttcctataaaagcacatagttatgtttactggtatcgtaagaagctggaagaagagctcaagtttttggtttactttcagaatgaagaacttattcagaaagcagaaataatcaatgagcgatttttagcccaatgctccaaaaactcatcctgtaccttggagatccagtccacggagtcaggggacacagcactgtatttctgtgccagcagtgaaggtctcataggagacgtcgacaccggggagctgttttttggagaaggctctaggctgaccgtactgggtaaggaggcggttggggctccggagagctccgagagggcgggatgggcagaggaggtctcataggagacctgatggcgcgagggaggc

SEQ ID NO: 3867 - DNA, 495 bp, Artificial Sequence
  source: /note="Description of Artificial Sequence: Synthetic polynucleotide"
gccttgccagcccgctcagaggtctcagtgtctacctccacaggctccacggacaccaaggtcacccagagacctagacttctggtcaaagcaagtgaacagaaagcaaagatggattgtgttcctataaaagcacatagttatgtttactggtatcgtaagaagctggaagaagagctcaagtttttggtttactttcagaatgaagaacttattcagaaagcagaaataatcaatgagcgatttttagcccaatgctccaaaaactcatcctgtaccttggagatccagtccacggagtcaggggacacagcactgtatttctgtgccagcagtgaaggtctcagtgtctacgtcgacagatacgcagtattttggcccaggcacccggctgacagtgctcggtaagcgggggctcccgctgaagccccggaactggggagggggcgccccgggacgcaggtctcagtgtctacctgatggcgcgagggaggc

SEQ ID NO: 3868 - DNA, 495 bp, Artificial Sequence
  source: /note="Description of Artificial Sequence: Synthetic polynucleotide"
gccttgccagcccgctcagaggtctcagtacagtgctccacaggctccacggacaccaaggtcacccagagacctagacttctggtcaaagcaagtgaacagaaagcaaagatggattgtgttcctataaaagcacatagttatgtttactggtatcgtaagaagctggaagaagagctcaagtttttggtttactttcagaatgaagaacttattcagaaagcagaaataatcaatgagcgatttttagcccaatgctccaaaaactcatcctgtaccttggagatccagtccacggagtcaggggacacagcactgtatttctgtgccagcagtgaaggtctcagtacagtggtcgacaaaacattcagtacttcggcgccgggacccggctctcagtgctgggtaagctggggccgccgggggaccggggacgagactgcgctcgggtttttgtgcgaggtctcagtacagtgctgatggcgcgagggaggc

SEQ ID NO: 3869 - DNA, 495 bp, Artificial Sequence
  source: /note="Description of Artificial Sequence: Synthetic polynucleotide"
gccttgccagcccgctcagaggtctcaggatcatcctccacaggctccacggacaccaaggtcacccagagacctagacttctggtcaaagcaagtgaacagaaagcaaagatggattgtgttcctataaaagcacatagttatgtttactggtatcgtaagaagctggaagaagagctcaagtttttggtttactttcagaatgaagaacttattcagaaagcagaaataatcaatgagcgatttttagcccaatgctccaaaaactcatcctgtaccttggagatccagtccacggagtcaggggacacagcactgtatttctgtgccagcagtgaaggtctcaggatcatcgtcgacgagacccagtacttcgggccaggcacgcggctcctggtgctcggtgagcgcgggctgctggggcgcgggcgcgggcggcttgggtctggtttttgcggggaggtctcaggatcatcctgatggcgcgagggaggc

SEQ ID NO: 3870 - DNA, 495 bp, Artificial Sequence
  source: /note="Description of Artificial Sequence: Synthetic polynucleotide"
gccttgccagcccgctcagaggtctcatattggcgctccacaggctccacggacaccaaggtcacccagagacctagacttctggtcaaagcaagtgaacagaaagcaaagatggattgtgttcctataaaagcacatagttatgtttactggtatcgtaagaagctggaagaagagctcaagtttttggtttactttcagaatgaagaacttattcagaaagcagaaataatcaatgagcgatttttagcccaatgctccaaaaactcatcctgtaccttggagatccagtccacggagtcaggggacacagcactgtatttctgtgccagcagtgaaggtctcatattggcggtcgacgggccaacgtcctgactttcggggccggcagcaggctgaccgtgctgggtgagttttcgcgggaccacccgggcggcgggattcaggtggaaggcggcggaggtctcatattggcgctgatggcgcgagggaggc

SEQ ID NO: 3871 - DNA, 495 bp, Artificial Sequence
  source: /note="Description of Artificial Sequence: Synthetic polynucleotide"
gccttgccagcccgctcagaggtctcaaggcttgactccacaggctccacggacaccaaggtcacccagagacctagacttctggtcaaagcaagtgaacagaaagcaaagatggattgtgttcctataaaagcacatagttatgtttactggtatcgtaagaagctggaagaagagctcaagtttttggtttactttcagaatgaagaacttattcagaaagcagaaataatcaatgagcgatttttagcccaatgctccaaaaactcatcctgtaccttggagatccagtccacggagtcaggggacacagcactgtatttctgtgccagcagtgaaggtctcaaggcttgagtcgacacgagcagtacttcgggccgggcaccaggctcacggtcacaggtgagattcgggcgtctccccaccttccagcccctcggtccccggagtcggagggtggaggtctcaaggcttgactgatggcgcgagggaggc

SEQ ID NO: 3872 - DNA, 495 bp, Artificial Sequence
  source: /note="Description of Artificial Sequence: Synthetic polynucleotide"
gccttgccagcccgctcaggtccattcgacactctttgtctcttggacccttggatgctgacatctatcagatgccattccagctcactggggctggatgggatgtgactctggagtggaaacggaatttgagacacaatgacatgtactgctactggtactggcaggacccaaagcaaaatctgagactgatctattactcaagggttgaaaaggatattcagagaggagatctaactgaaggctacgtgtctgccaagaggagaaggggctatttcttctcagggtgaagttggcccacaccagccaaacagctttgtacttctgtcctgggatgagtccattcgacactctgtcgacactgaagctttctttggacaaggcaccagactcacagttgtaggtaagacatttttcaggttcttttgcagatccgtcacagggaaaagtgggtccacaggtccattcgacactctctgatggcgcgagggaggc

SEQ ID NO: 3873 - DNA, 495 bp, Artificial Sequence
  source: /note="Description of Artificial Sequence: Synthetic polynucleotide"
gccttgccagcccgctcaggtccattcttcggaacttgtctcttggacccttggatgctgacatctatcagatgccattccagctcactggggctggatgggatgtgactctggagtggaaacggaatttgagacacaatgacatgtactgctactggtactggcaggacccaaagcaaaatctgagactgatctattactcaagggttgaaaaggatattcagagaggagatctaactgaaggctacgtgtctgccaagaggagaaggggctatttcttctcagggtgaagttggcccacaccagccaaacagctttgtacttctgtcctgggatgagtccattcttcggaacgtcgactatggctacaccttcggttcggggaccaggttaaccgttgtaggtaaggctgggggtctctaggaggggtgcgatgagggaggactctgtcctgggaaatgtccattcttcggaacctgatggcgcgagggaggc

SEQ ID NO: 3874 - DNA, 495 bp, Artificial Sequence
  source: /note="Description of Artificial Sequence: Synthetic polynucleotide"
gccttgccagcccgctcaggtccattcaagtaacgttgtctcttggacccttggatgctgacatctatcagatgccattccagctcactggggctggatgggatgtgactctggagtggaaacggaatttgagacacaatgacatgtactgctactggtactggcaggacccaaagcaaaatctgagactgatctattactcaagggttgaaaaggatattcagagaggagatctaactgaaggctacgtgtctgccaagaggagaaggggctatttcttctcagggtgaagttggcccacaccagccaaacagctttgtacttctgtcctgggatgagtccattcaagtaacggtcgacgaaacaccatatattttggagagggaagttggctcactgttgtaggtgagtaagtcaaggctggacagctgggaacttgcaaaaaggggctggaatccaggtccattcaagtaacgctgatggcgcgagggaggc

SEQ ID NO: 3875 - DNA, 495 bp, Artificial Sequence
  source: /note="Description of Artificial Sequence: Synthetic polynucleotide"
gccttgccagcccgctcaggtccattcgtctcctattgtctcttggacccttggatgctgacatctatcagatgccattccagctcactggggctggatgggatgtgactctggagtggaaacggaatttgagacacaatgacatgtactgctactggtactggcaggacccaaagcaaaatctgagactgatctattactcaagggttgaaaaggatattcagagaggagatctaactgaaggctacgtgtctgccaagaggagaaggggctatttcttctcagggtgaagttggcccacaccagccaaacagctttgtacttctgtcctgggatgagtccattcgtctcctagtcgacaatgaaaaactgttttttggcagtggaacccagctctctgtcttgggtatgtaaaagacttctttcgggatagtgtatcataaggtcggagttccaggaggtccattcgtctcctactgatggcgcgagggaggc

SEQ ID NO: 3876 - DNA, 495 bp, Artificial Sequence
  source: /note="Description of Artificial Sequence: Synthetic polynucleotide"
gccttgccagcccgctcaggtccattcagagtgtcttgtctcttggacccttggatgctgacatctatcagatgccattccagctcactggggctggatgggatgtgactctggagtggaaacggaatttgagacacaatgacatgtactgctactggtactggcaggacccaaagcaaaatctgagactgatctattactcaagggttgaaaaggatattcagagaggagatctaactgaaggctacgtgtctgccaagaggagaaggggctatttcttctcagggtgaagttggcccacaccagccaaacagctttgtacttctgtcctgggatgagtccattcagagtgtcgtcgacatcagccccagcattttggtgatgggactcgactctccatcctaggtaagttgcagaatcagggtggtatggccattgtcccttgaaggcagagttctctgtccattcagagtgtcctgatggcgcgagggaggc

SEQ ID NO: 3877 - DNA, 495 bp, Artificial Sequence
  source: /note="Description of Artificial Sequence: Synthetic polynucleotide"
gccttgccagcccgctcaggtccattcgttccgaattgtctcttggacccttggatgctgacatctatcagatgccattccagctcactggggctggatgggatgtgactctggagtggaaacggaatttgagacacaatgacatgtactgctactggtactggcaggacccaaagcaaaatctgagactgatctattactcaagggttgaaaaggatattcagagaggagatctaactgaaggctacgtgtctgccaagaggagaaggggctatttcttctcagggtgaagttggcccacaccagccaaacagctttgtacttctgtcctgggatgagtccattcgttccgaagtcgacataattcacccctccactttgggaacgggaccaggctcactgtgacaggtatgggggctccactcttgactcgggggtgcctgggtttgactgcaatgatgtccattcgttccgaactgatggcgcgagggaggc

SEQ ID NO: 3878 - DNA, 495 bp, Artificial Sequence
  source: /note="Description of Artificial Sequence: Synthetic polynucleotide"
gccttgccagcccgctcaggtccattccgttacttttgtctcttggacccttggatgctgacatctatcagatgccattccagctcactggggctggatgggatgtgactctggagtggaaacggaatttgagacacaatgacatgtactgctactggtactggcaggacccaaagcaaaatctgagactgatctattactcaagggttgaaaaggatattcagagaggagatctaactgaaggctacgtgtctgccaagaggagaaggggctatttcttctcagggtgaagttggcccacaccagccaaacagctttgtacttctgtcctgggatgagtccattccgttacttgtcgacacaatgagcagttcttcgggccagggacacggctcaccgtgctaggtaagaagggggctccaggtgggagagagggtgagcagcccagcctgcacgacccgtccattccgttacttctgatggcgcgagggaggc

SEQ ID NO: 3879 - DNA, 495 bp, Artificial Sequence
  source: /note="Description of Artificial Sequence: Synthetic polynucleotide"
gccttgccagcccgctcaggtccattctaggagacttgtctcttggacccttggatgctgacatctatcagatgccattccagctcactggggctggatgggatgtgactctggagtggaaacggaatttgagacacaatgacatgtactgctactggtactggcaggacccaaagcaaaatctgagactgatctattactcaagggttgaaaaggatattcagagaggagatctaactgaaggctacgtgtctgccaagaggagaaggggctatttcttctcagggtgaagttggcccacaccagccaaacagctttgtacttctgtcctgggatgagtccattctaggagacgtcgacaccggggagctgttttttggagaaggctctaggctgaccgtactgggtaaggaggcggttggggctccggagagctccgagagggcgggatgggcagagggtccattctaggagacctgatggcgcgagggaggc

SEQ ID NO: 3880 - DNA, 495 bp, Artificial Sequence
  source: /note="Description of Artificial Sequence: Synthetic polynucleotide"
gccttgccagcccgctcaggtccattcgtgtctacttgtctcttggacccttggatgctgacatctatcagatgccattccagctcactggggctggatgggatgtgactctggagtggaaacggaatttgagacacaatgacatgtactgctactggtactggcaggacccaaagcaaaatctgagactgatctattactcaagggttgaaaaggatattcagagaggagatctaactgaaggctacgtgtctgccaagaggagaaggggctatttcttctcagggtgaagttggcccacaccagccaaacagctttgtacttctgtcctgggatgagtccattcgtgtctacgtcgacagatacgcagtattttggcccaggcacccggctgacagtgctcggtaagcgggggctcccgctgaagccccggaactggggagggggcgccccgggacgcgtccattcgtgtctacctgatggcgcgagggaggc

SEQ ID NO: 3881 - DNA, 495 bp, Artificial Sequence
  source: /note="Description of Artificial Sequence: Synthetic polynucleotide"
gccttgccagcccgctcaggtccattcgtacagtgttgtctcttggacccttggatgctgacatctatcagatgccattccagctcactggggctggatgggatgtgactctggagtggaaacggaatttgagacacaatgacatgtactgctactggtactggcaggacccaaagcaaaatctgagactgatctattactcaagggttgaaaaggatattcagagaggagatctaactgaaggctacgtgtctgccaagaggagaaggggctatttcttctcagggtgaagttggcccacaccagccaaacagctttgtacttctgtcctgggatgagtccattcgtacagtggtcgacaaaacattcagtacttcggcgccgggacccggctctcagtgctgggtaagctggggccgccgggggaccggggacgagactgcgctcgggtttttgtgcggtccattcgtacagtgctgatggcgcgagggaggc

SEQ ID NO: 3882 - DNA, 495 bp, Artificial Sequence
  source: /note="Description of Artificial Sequence: Synthetic polynucleotide"
gccttgccagcccgctcaggtccattcggatcatcttgtctcttggacccttggatgctgacatctatcagatgccattccagctcactggggctggatgggatgtgactctggagtggaaacggaatttgagacacaatgacatgtactgctactggtactggcaggacccaaagcaaaatctgagactgatctattactcaagggttgaaaaggatattcagagaggagatctaactgaaggctacgtgtctgccaagaggagaaggggctatttcttctcagggtgaagttggcccacaccagccaaacagctttgtacttctgtcctgggatgagtccattcggatcatcgtcgacgagacccagtacttcgggccaggcacgcggctcctggtgctcggtgagcgcgggctgctggggcgcgggcgcgggcggcttgggtctggtttttgcgggggtccattcggatcatcctgatggcgcgagggaggc

SEQ ID NO: 3883 - DNA, 495 bp, Artificial Sequence
  source: /note="Description of Artificial Sequence: Synthetic polynucleotide"
gccttgccagcccgctcaggtccattctattggcgttgtctcttggacccttggatgctgacatctatcagatgccattccagctcactggggctggatgggatgtgactctggagtggaaacggaatttgagacacaatgacatgtactgctactggtactggcaggacccaaagcaaaatctgagactgatctattactcaagggttgaaaaggatattcagagaggagatctaactgaaggctacgtgtctgccaagaggagaaggggctatttcttctcagggtgaagttggcccacaccagccaaacagctttgtacttctgtcctgggatgagtccattctattggcggtcgacgggccaacgtcctgactttcggggccggcagcaggctgaccgtgctgggtgagttttcgcgggaccacccgggcggcgggattcaggtggaaggcggcgggtccattctattggcgctgatggcgcgagggaggc

SEQ ID NO: 3884 - DNA, 495 bp, Artificial Sequence
  source: /note="Description of Artificial Sequence: Synthetic polynucleotide"
gccttgccagcccgctcaggtccattcaggcttgattgtctcttggacccttggatgctgacatctatcagatgccattccagctcactggggctggatgggatgtgactctggagtggaaacggaatttgagacacaatgacatgtactgctactggtactggcaggacccaaagcaaaatctgagactgatctattactcaagggttgaaaaggatattcagagaggagatctaactgaaggctacgtgtctgccaagaggagaaggggctatttcttctcagggtgaagttggcccacaccagccaaacagctttgtacttctgtcctgggatgagtccattcaggcttgagtcgacacgagcagtacttcgggccgggcaccaggctcacggtcacaggtgagattcgggcgtctccccaccttccagcccctcggtccccggagtcggagggtgggtccattcaggcttgactgatggcgcgagggaggc

SEQ ID NO: 3885 - DNA, 495 bp, Artificial Sequence
  source: /note="Description of Artificial Sequence: Synthetic polynucleotide"
gccttgccagcccgctcagactatgacgacactcttcttacagactcttttcatgccaaagtcacacagactccaggacatttggtcaaaggaaaaggacagaaaacaaagatggattgtacccccgaaaaaggacatacttttgtttattggtatcaacagaatcagaataaagagtttatgcttttgatttcctttcagaatgaacaagttcttcaagaaacggagatgcacaagaagcgattctcatctcaatgccccaagaacgcaccctgcagcctggcaatcctgtcctcagaaccgggagacacggcactgtatctctgcgccagcagtgaactatgacgacactctgtcgacactgaagctttctttggacaaggcaccagactcacagttgtaggtaagacatttttcaggttcttttgcagatccgtcacagggaaaagtgggtccacagactatgacgacactctctgatggcgcgagggaggc

SEQ ID NO: 3886 - DNA, 495 bp, Artificial Sequence
  source: /note="Description of Artificial Sequence: Synthetic polynucleotide"
gccttgccagcccgctcagactatgacttcggaactcttacagactcttttcatgccaaagtcacacagactccaggacatttggtcaaaggaaaaggacagaaaacaaagatggattgtacccccgaaaaaggacatacttttgtttattggtatcaacagaatcagaataaagagtttatgcttttgatttcctttcagaatgaacaagttcttcaagaaacggagatgcacaagaagcgattctcatctcaatgccccaagaacgcaccctgcagcctggcaatcctgtcctcagaaccgggagacacggcactgtatctctgcgccagcagtgaactatgacttcggaacgtcgactatggctacaccttcggttcggggaccaggttaaccgttgtaggtaaggctgggggtctctaggaggggtgcgatgagggaggactctgtcctgggaaatactatgacttcggaacctgatggcgcgagggaggc

SEQ ID NO: 3887 - DNA, 495 bp, Artificial Sequence
  source: /note="Description of Artificial Sequence: Synthetic polynucleotide"
gccttgccagcccgctcagactatgacaagtaacgtcttacagactcttttcatgccaaagtcacacagactccaggacatttggtcaaaggaaaaggacagaaaacaaagatggattgtacccccgaaaaaggacatacttttgtttattggtatcaacagaatcagaataaagagtttatgcttttgatttcctttcagaatgaacaagttcttcaagaaacggagatgcacaagaagcgattctcatctcaatgccccaagaacgcaccctgcagcctggcaatcctgtcctcagaaccgggagacacggcactgtatctctgcgccagcagtgaactatgacaagtaacggtcgacgaaacaccatatattttggagagggaagttggctcactgttgtaggtgagtaagtcaaggctggacagctgggaacttgcaaaaaggggctggaatccagactatgacaagtaacgctgatggcgcgagggaggc

SEQ ID NO: 3888 - DNA, 495 bp, Artificial Sequence
  source: /note="Description of Artificial Sequence: Synthetic polynucleotide"
gccttgccagcccgctcagactatgacgtctcctatcttacagactcttttcatgccaaagtcacacagactccaggacatttggtcaaaggaaaaggacagaaaacaaagatggattgtacccccgaaaaaggacatacttttgtttattggtatcaacagaatcagaataaagagtttatgcttttgatttcctttcagaatgaacaagttcttcaagaaacggagatgcacaagaagcgattctcatctcaatgccccaagaacgcaccctgcagcctggcaatcctgtcctcagaaccgggagacacggcactgtatctctgcgccagcagtgaactatgacgtctcctagtcgacaatgaaaaactgttttttggcagtggaacccagctctctgtcttgggtatgtaaaagacttctttcgggatagtgtatcataaggtcggagttccaggagactatgacgtctcctactgatggcgcgagggaggc

SEQ ID NO: 3889 - DNA, 495 bp, Artificial Sequence
  source: /note="Description of Artificial Sequence: Synthetic polynucleotide"
gccttgccagcccgctcagactatgacagagtgtctcttacagactcttttcatgccaaagtcacacagactccaggacatttggtcaaaggaaaaggacagaaaacaaagatggattgtacccccgaaaaaggacatacttttgtttattggtatcaacagaatcagaataaagagtttatgcttttgatttcctttcagaatgaacaagttcttcaagaaacggagatgcacaagaagcgattctcatctcaatgccccaagaacgcaccctgcagcctggcaatcctgtcctcagaaccgggagacacggcactgtatctctgcgccagcagtgaactatgacagagtgtcgtcgacatcagccccagcattttggtgatgggactcgactctccatcctaggtaagttgcagaatcagggtggtatggccattgtcccttgaaggcagagttctctactatgacagagtgtcctgatggcgcgagggaggc

SEQ ID NO: 3890 - DNA, 495 bp, Artificial Sequence
  source: /note="Description of Artificial Sequence: Synthetic polynucleotide"
gccttgccagcccgctcagactatgacgttccgaatcttacagactcttttcatgccaaagtcacacagactccaggacatttggtcaaaggaaaaggacagaaaacaaagatggattgtacccccgaaaaaggacatacttttgtttattggtatcaacagaatcagaataaagagtttatgcttttgatttcctttcagaatgaacaagttcttcaagaaacggagatgcacaagaagcgattctcatctcaatgccccaagaacgcaccctgcagcctggcaatcctgtcctcagaaccgggagacacggcactgtatctctgcgccagcagtgaactatgacgttccgaagtcgacataattcacccctccactttgggaacgggaccaggctcactgtgacaggtatgggggctccactcttgactcgggggtgcctgggtttgactgcaatgatactatgacgttccgaactgatggcgcgagggaggc

SEQ ID NO: 3891 - DNA, 495 bp, Artificial Sequence
  source: /note="Description of Artificial Sequence: Synthetic polynucleotide"
gccttgccagcccgctcagactatgaccgttactttcttacagactcttttcatgccaaagtcacacagactccaggacatttggtcaaaggaaaaggacagaaaacaaagatggattgtacccccgaaaaaggacatacttttgtttattggtatcaacagaatcagaataaagagtttatgcttttgatttcctttcagaatgaacaagttcttcaagaaacggagatgcacaagaagcgattctcatctcaatgccccaagaacgcaccctgcagcctggcaatcctgtcctcagaaccgggagacacggcactgtatctctgcgccagcagtgaactatgaccgttacttgtcgacacaatgagcagttcttcgggccagggacacggctcaccgtgctaggtaagaagggggctccaggtgggagagagggtgagcagcccagcctgcacgacccactatgaccgttacttctgatggcgcgagggaggc

SEQ ID NO: 3892 - DNA, 495 bp, Artificial Sequence
  source: /note="Description of Artificial Sequence: Synthetic polynucleotide"
gccttgccagcccgctcagactatgactaggagactcttacagactcttttcatgccaaagtcacacagactccaggacatttggtcaaaggaaaaggacagaaaacaaagatggattgtacccccgaaaaaggacatacttttgtttattggtatcaacagaatcagaataaagagtttatgcttttgatttcctttcagaatgaacaagttcttcaagaaacggagatgcacaagaagcgattctcatctcaatgccccaagaacgcaccctgcagcctggcaatcctgtcctcagaaccgggagacacggcactgtatctctgcgccagcagtgaactatgactaggagacgtcgacaccggggagctgttttttggagaaggctctaggctgaccgtactgggtaaggaggcggttggggctccggagagctccgagagggcgggatgggcagaggactatgactaggagacctgatggcgcgagggaggc

SEQ ID NO: 3893 - DNA, 495 bp, Artificial Sequence
  source: /note="Description of Artificial Sequence: Synthetic polynucleotide"
gccttgccagcccgctcagactatgacgtgtctactcttacagactcttttcatgccaaagtcacacagactccaggacatttggtcaaaggaaaaggacagaaaacaaagatggattgtacccccgaaaaaggacatacttttgtttattggtatcaacagaatcagaataaagagtttatgcttttgatttcctttcagaatgaacaagttcttcaagaaacggagatgcacaagaagcgattctcatctcaatgccccaagaacgcaccctgcagcctggcaatcctgtcctcagaaccgggagacacggcactgtatctctgcgccagcagtgaactatgacgtgtctacgtcgacagatacgcagtattttggcccaggcacccggctgacagtgctcggtaagcgggggctcccgctgaagccccggaactggggagggggcgccccgggacgcactatgacgtgtctacctgatggcgcgagggaggc

SEQ ID NO: 3894 - DNA, 495 bp, Artificial Sequence
  source: /note="Description of Artificial Sequence: Synthetic polynucleotide"
gccttgccagcccgctcagactatgacgtacagtgtcttacagactcttttcatgccaaagtcacacagactccaggacatttggtcaaaggaaaaggacagaaaacaaagatggattgtacccccgaaaaaggacatacttttgtttattggtatcaacagaatcagaataaagagtttatgcttttgatttcctttcagaatgaacaagttcttcaagaaacggagatgcacaagaagcgattctcatctcaatgccccaagaacgcaccctgcagcctggcaatcctgtcctcagaaccgggagacacggcactgtatctctgcgccagcagtgaactatgacgtacagtggtcgacaaaacattcagtacttcggcgccgggacccggctctcagtgctgggtaagctggggccgccgggggaccggggacgagactgcgctcgggtttttgtgcgactatgacgtacagtgctgatggcgcgagggaggc

SEQ ID NO: 3895 - DNA, 495 bp, Artificial Sequence
  source: /note="Description of Artificial Sequence: Synthetic polynucleotide"
gccttgccagcccgctcagactatgacggatcatctcttacagactcttttcatgccaaagtcacacagactccaggacatttggtcaaaggaaaaggacagaaaacaaagatggattgtacccccgaaaaaggacatacttttgtttattggtatcaacagaatcagaataaagagtttatgcttttgatttcctttcagaatgaacaagttcttcaagaaacggagatgcacaagaagcgattctcatctcaatgccccaagaacgcaccctgcagcctggcaatcctgtcctcagaaccgggagacacggcactgtatctctgcgccagcagtgaactatgacggatcatcgtcgacgagacccagtacttcgggccaggcacgcggctcctggtgctcggtgagcgcgggctgctggggcgcgggcgcgggcggcttgggtctggtttttgcggggactatgacggatcatcctgatggcgcgagggaggc

SEQ ID NO: 3896 - DNA, 495 bp, Artificial Sequence
  source: /note="Description of Artificial Sequence: Synthetic polynucleotide"
gccttgccagcccgctcagactatgactattggcgtcttacagactcttttcatgccaaagtcacacagactccaggacatttggtcaaaggaaaaggacagaaaacaaagatggattgtacccccgaaaaaggacatacttttgtttattggtatcaacagaatcagaataaagagtttatgcttttgatttcctttcagaatgaacaagttcttcaagaaacggagatgcacaagaagcgattctcatctcaatgccccaagaacgcaccctgcagcctggcaatcctgtcctcagaaccgggagacacggcactgtatctctgcgccagcagtgaactatgactattggcggtcgacgggccaacgtcctgactttcggggccggcagcaggctgaccgtgctgggtgagttttcgcgggaccacccgggcggcgggattcaggtggaaggcggcggactatgactattggcgctgatggcgcgagggaggc

SEQ ID NO: 3897 - DNA, 495 bp, Artificial Sequence
  source: /note="Description of Artificial Sequence: Synthetic polynucleotide"
gccttgccagcccgctcagactatgacaggcttgatcttacagactcttttcatgccaaagtcacacagactccaggacatttggtcaaaggaaaaggacagaaaacaaagatggattgtacccccgaaaaaggacatacttttgtttattggtatcaacagaatcagaataaagagtttatgcttttgatttcctttcagaatgaacaagttcttcaagaaacggagatgcacaagaagcgattctcatctcaatgccccaagaacgcaccctgcagcctggcaatcctgtcctcagaaccgggagacacggcactgtatctctgcgccagcagtgaactatgacaggcttgagtcgacacgagcagtacttcgggccgggcaccaggctcacggtcacaggtgagattcgggcgtctccccaccttccagcccctcggtccccggagtcggagggtggactatgacaggcttgactgatggcgcgagggaggc

SEQ ID NO: 3898 - DNA, 495 bp, Artificial Sequence
  source: /note="Description of Artificial Sequence: Synthetic polynucleotide"
gccttgccagcccgctcagtccatgtggacactctatttccacagggtccatggatgctgatgttacccagaccccaaggaataggatcacaaagacaggaaagaggattatgctggaatgttctcagactaagggtcatgatagaatgtactggtatcgacaagacccaggactgggcctacggttgatctattactcctttgatgtcaaagatataaacaaaggagagatctctgatggatacagtgtctctcgacaggcacaggctaaattctccctgtccctagagtctgccatccccaaccagacagctctttacttctgtgccaccagttgatccatgtggacactctgtcgacactgaagctttctttggacaaggcaccagactcacagttgtaggtaagacatttttcaggttcttttgcagatccgtcacagggaaaagtgggtccacagtccatgtggacactctctgatggcgcgagggaggc

SEQ ID NO: 3899 - DNA, 495 bp, Artificial Sequence
  source: /note="Description of Artificial Sequence: Synthetic polynucleotide"
gccttgccagcccgctcagtccatgtgttcggaacatttccacagggtccatggatgctgatgttacccagaccccaaggaataggatcacaaagacaggaaagaggattatgctggaatgttctcagactaagggtcatgatagaatgtactggtatcgacaagacccaggactgggcctacggttgatctattactcctttgatgtcaaagatataaacaaaggagagatctctgatggatacagtgtctctcgacaggcacaggctaaattctccctgtccctagagtctgccatccccaaccagacagctctttacttctgtgccaccagttgatccatgtgttcggaacgtcgactatggctacaccttcggttcggggaccaggttaaccgttgtaggtaaggctgggggtctctaggaggggtgcgatgagggaggactctgtcctgggaaattccatgtgttcggaacctgatggcgcgagggaggc

SEQ ID NO: 3900 - DNA, 495 bp, Artificial Sequence
  source: /note="Description of Artificial Sequence: Synthetic polynucleotide"
gccttgccagcccgctcagtccatgtgaagtaacgatttccacagggtccatggatgctgatgttacccagaccccaaggaataggatcacaaagacaggaaagaggattatgctggaatgttctcagactaagggtcatgatagaatgtactggtatcgacaagacccaggactgggcctacggttgatctattactcctttgatgtcaaagatataaacaaaggagagatctctgatggatacagtgtctctcgacaggcacaggctaaattctccctgtccctagagtctgccatccccaaccagacagctctttacttctgtgccaccagttgatccatgtgaagtaacggtcgacgaaacaccatatattttggagagggaagttggctcactgttgtaggtgagtaagtcaaggctggacagctgggaacttgcaaaaaggggctggaatccagtccatgtgaagtaacgctgatggcgcgagggaggc

SEQ ID NO: 3901 - DNA, 495 bp, Artificial Sequence
  source: /note="Description of Artificial Sequence: Synthetic polynucleotide"
gccttgccagcccgctcagtccatgtggtctcctaatttccacagggtccatggatgctgatgttacccagaccccaaggaataggatcacaaagacaggaaagaggattatgctggaatgttctcagactaagggtcatgatagaatgtactggtatcgacaagacccaggactgggcctacggttgatctattactcctttgatgtcaaagatataaacaaaggagagatctctgatggatacagtgtctctcgacaggcacaggctaaattctccctgtccctagagtctgccatccccaaccagacagctctttacttctgtgccaccagttgatccatgtggtctcctagtcgacaatgaaaaactgttttttggcagtggaacccagctctctgtcttgggtatgtaaaagacttctttcgggatagtgtatcataaggtcggagttccaggagtccatgtggtctcctactgatggcgcgagggaggc

SEQ ID NO: 3902 - DNA, 495 bp, Artificial Sequence
  source: /note="Description of Artificial Sequence: Synthetic polynucleotide"
gccttgccagcccgctcagtccatgtgagagtgtcatttccacagggtccatggatgctgatgttacccagaccccaaggaataggatcacaaagacaggaaagaggattatgctggaatgttctcagactaagggtcatgatagaatgtactggtatcgacaagacccaggactgggcctacggttgatctattactcctttgatgtcaaagatataaacaaaggagagatctctgatggatacagtgtctctcgacaggcacaggctaaattctccctgtccctagagtctgccatccccaaccagacagctctttacttctgtgccaccagttgatccatgtgagagtgtcgtcgacatcagccccagcattttggtgatgggactcgactctccatcctaggtaagttgcagaatcagggtggtatggccattgtcccttgaaggcagagttctcttccatgtgagagtgtcctgatggcgcgagggaggc

SEQ ID NO: 3903 - DNA, 495 bp, Artificial Sequence
  source: /note="Description of Artificial Sequence: Synthetic polynucleotide"
gccttgccagcccgctcagtccatgtggttccgaaatttccacagggtccatggatgctgatgttacccagaccccaaggaataggatcacaaagacaggaaagaggattatgctggaatgttctcagactaagggtcatgatagaatgtactggtatcgacaagacccaggactgggcctacggttgatctattactcctttgatgtcaaagatataaacaaaggagagatctctgatggatacagtgtctctcgacaggcacaggctaaattctccctgtccctagagtctgccatccccaaccagacagctctttacttctgtgccaccagttgatccatgtggttccgaagtcgacataattcacccctccactttgggaacgggaccaggctcactgtgacaggtatgggggctccactcttgactcgggggtgcctgggtttgactgcaatgattccatgtggttccgaactgatggcgcgagggaggc

SEQ ID NO: 3904 - DNA, 495 bp, Artificial Sequence
  source: /note="Description of Artificial Sequence: Synthetic polynucleotide"
gccttgccagcccgctcagtccatgtgcgttacttatttccacagggtccatggatgctgatgttacccagaccccaaggaataggatcacaaagacaggaaagaggattatgctggaatgttctcagactaagggtcatgatagaatgtactggtatcgacaagacccaggactgggcctacggttgatctattactcctttgatgtcaaagatataaacaaaggagagatctctgatggatacagtgtctctcgacaggcacaggctaaattctccctgtccctagagtctgccatccccaaccagacagctctttacttctgtgccaccagttgatccatgtgcgttacttgtcgacacaatgagcagttcttcgggccagggacacggctcaccgtgctaggtaagaagggggctccaggtgggagagagggtgagcagcccagcctgcacgaccctccatgtgcgttacttctgatggcgcgagggaggc

SEQ ID NO: 3905 - DNA, 495 bp, Artificial Sequence
  source: /note="Description of Artificial Sequence: Synthetic polynucleotide"
gccttgccagcccgctcagtccatgtgtaggagacatttccacagggtccatggatgctgatgttacccagaccccaaggaataggatcacaaagacaggaaagaggattatgctggaatgttctcagactaagggtcatgatagaatgtactggtatcgacaagacccaggactgggcctacggttgatctattactcctttgatgtcaaagatataaacaaaggagagatctctgatggatacagtgtctctcgacaggcacaggctaaattctccctgtccctagagtctgccatccccaaccagacagctctttacttctgtgccaccagttgatccatgtgtaggagacgtcgacaccggggagctgttttttggagaaggctctaggctgaccgtactgggtaaggaggcggttggggctccggagagctccgagagggcgggatgggcagaggtccatgtgtaggagacctgatggcgcgagggaggc

SEQ ID NO: 3906 - DNA, 495 bp, Artificial Sequence
  source: /note="Description of Artificial Sequence: Synthetic polynucleotide"
gccttgccagcccgctcagtccatgtggtgtctacatttccacagggtccatggatgctgatgttacccagaccccaaggaataggatcacaaagacaggaaagaggattatgctggaatgttctcagactaagggtcatgatagaatgtactggtatcgacaagacccaggactgggcctacggttgatctattactcctttgatgtcaaagatataaacaaaggagagatctctgatggatacagtgtctctcgacaggcacaggctaaattctccctgtccctagagtctgccatccccaaccagacagctctttacttctgtgccaccagttgatccatgtggtgtctacgtcgacagatacgcagtattttggcccaggcacccggctgacagtgctcggtaagcgggggctcccgctgaagccccggaactggggagggggcgccccgggacgctccatgtggtgtctacctgatggcgcgagggaggc

SEQ ID NO: 3907 - DNA, 495 bp, Artificial Sequence
  source: /note="Description of Artificial Sequence: Synthetic polynucleotide"
gccttgccagcccgctcagtccatgtggtacagtgatttccacagggtccatggatgctgatgttacccagaccccaaggaataggatcacaaagacaggaaagaggattatgctggaatgttctcagactaagggtcatgatagaatgtactggtatcgacaagacccaggactgggcctacggttgatctattactcctttgatgtcaaagatataaacaaaggagagatctctgatggatacagtgtctctcgacaggcacaggctaaattctccctgtccctagagtctgccatccccaaccagacagctctttacttctgtgccaccagttgatccatgtggtacagtggtcgacaaaacattcagtacttcggcgccgggacccggctctcagtgctgggtaagctggggccgccgggggaccggggacgagactgcgctcgggtttttgtgcgtccatgtggtacagtgctgatggcgcgagggaggc

SEQ ID NO: 3908 - DNA, 495 bp, Artificial Sequence
  source: /note="Description of Artificial Sequence: Synthetic polynucleotide"
gccttgccagcccgctcagtccatgtgggatcatcatttccacagggtccatggatgctgatgttacccagaccccaaggaataggatcacaaagacaggaaagaggattatgctggaatgttctcagactaagggtcatgatagaatgtactggtatcgacaagacccaggactgggcctacggttgatctattactcctttgatgtcaaagatataaacaaaggagagatctctgatggatacagtgtctctcgacaggcacaggctaaattctccctgtccctagagtctgccatccccaaccagacagctctttacttctgtgccaccagttgatccatgtgggatcatcgtcgacgagacccagtacttcgggccaggcacgcggctcctggtgctcggtgagcgcgggctgctggggcgcgggcgcgggcggcttgggtctggtttttgcggggtccatgtgggatcatcctgatggcgcgagggaggc

SEQ ID NO: 3909 - DNA, 495 bp, Artificial Sequence
  source: /note="Description of Artificial Sequence: Synthetic polynucleotide"
gccttgccagcccgctcagtccatgtgtattggcgatttccacagggtccatggatgctgatgttacccagaccccaaggaataggatcacaaagacaggaaagaggattatgctggaatgttctcagactaagggtcatgatagaatgtactggtatcgacaagacccaggactgggcctacggttgatctattactcctttgatgtcaaagatataaacaaaggagagatctctgatggatacagtgtctctcgacaggcacaggctaaattctccctgtccctagagtctgccatccccaaccagacagctctttacttctgtgccaccagttgatccatgtgtattggcggtcgacgggccaacgtcctgactttcggggccggcagcaggctgaccgtgctgggtgagttttcgcgggaccacccgggcggcgggattcaggtggaaggcggcggtccatgtgtattggcgctgatggcgcgagggaggc

SEQ ID NO: 3910 - DNA, 495 bp, Artificial Sequence
  source: /note="Description of Artificial Sequence: Synthetic polynucleotide"
gccttgccagcccgctcagtccatgtgaggcttgaatttccacagggtccatggatgctgatgttacccagaccccaaggaataggatcacaaagacaggaaagaggattatgctggaatgttctcagactaagggtcatgatagaatgtactggtatcgacaagacccaggactgggcctacggttgatctattactcctttgatgtcaaagatataaacaaaggagagatctctgatggatacagtgtctctcgacaggcacaggctaaattctccctgtccctagagtctgccatccccaaccagacagctctttacttctgtgccaccagttgatccatgtgaggcttgagtcgacacgagcagtacttcgggccgggcaccaggctcacggtcacaggtgagattcgggcgtctccccaccttccagcccctcggtccccggagtcggagggtggtccatgtgaggcttgactgatggcgcgagggaggc

SEQ ID NO: 3911 - DNA, 495 bp, Artificial Sequence
  source: /note="Description of Artificial Sequence: Synthetic polynucleotide"
gccttgccagcccgctcagatggtcaagacactcttcttcccataggcctcatggaagctgacatctaccagaccccaagataccttgttatagggacaggaaagaagatcactctggaatgttctcaaaccatgggccatgacaaaatgtactggtatcaacaagatccaggaatggaactacacctcatccactattcctatggagttaattccacagagaagggagatctttcctctgagtcaacagtctccagaataaggacggagcattttcccctgaccctggagtctgccaggccctcacatacctctcagtacctctgtgccagcagtgaatggtcaagacactctgtcgacactgaagctttctttggacaaggcaccagactcacagttgtaggtaagacatttttcaggttcttttgcagatccgtcacagggaaaagtgggtccacagatggtcaagacactctctgatggcgcgagggaggc

SEQ ID NO: 3912 - DNA, 495 bp, Artificial Sequence
  source: /note="Description of Artificial Sequence: Synthetic polynucleotide"
gccttgccagcccgctcagatggtcaattcggaactcttcccataggcctcatggaagctgacatctaccagaccccaagataccttgttatagggacaggaaagaagatcactctggaatgttctcaaaccatgggccatgacaaaatgtactggtatcaacaagatccaggaatggaactacacctcatccactattcctatggagttaattccacagagaagggagatctttcctctgagtcaacagtctccagaataaggacggagcattttcccctgaccctggagtctgccaggccctcacatacctctcagtacctctgtgccagcagtgaatggtcaattcggaacgtcgactatggctacaccttcggttcggggaccaggttaaccgttgtaggtaaggctgggggtctctaggaggggtgcgatgagggaggactctgtcctgggaaatatggtcaattcggaacctgatggcgcgagggaggc

SEQ ID NO: 3913 - DNA, 495 bp, Artificial Sequence
  source: /note="Description of Artificial Sequence: Synthetic polynucleotide"
gccttgccagcccgctcagatggtcaaaagtaacgtcttcccataggcctcatggaagctgacatctaccagaccccaagataccttgttatagggacaggaaagaagatcactctggaatgttctcaaaccatgggccatgacaaaatgtactggtatcaacaagatccaggaatggaactacacctcatccactattcctatggagttaattccacagagaagggagatctttcctctgagtcaacagtctccagaataaggacggagcattttcccctgaccctggagtctgccaggccctcacatacctctcagtacctctgtgccagcagtgaatggtcaaaagtaacggtcgacgaaacaccatatattttggagagggaagttggctcactgttgtaggtgagtaagtcaaggctggacagctgggaacttgcaaaaaggggctggaatccagatggtcaaaagtaacgctgatggcgcgagggaggc

SEQ ID NO: 3914 - DNA, 495 bp, Artificial Sequence
  source: /note="Description of Artificial Sequence: Synthetic polynucleotide"
gccttgccagcccgctcagatggtcaagtctcctatcttcccataggcctcatggaagctgacatctaccagaccccaagataccttgttatagggacaggaaagaagatcactctggaatgttctcaaaccatgggccatgacaaaatgtactggtatcaacaagatccaggaatggaactacacctcatccactattcctatggagttaattccacagagaagggagatctttcctctgagtcaacagtctccagaataaggacggagcattttcccctgaccctggagtctgccaggccctcacatacctctcagtacctctgtgccagcagtgaatggtcaagtctcctagtcgacaatgaaaaactgttttttggcagtggaacccagctctctgtcttgggtatgtaaaagacttctttcgggatagtgtatcataaggtcggagttccaggagatggtcaagtctcctactgatggcgcgagggaggc

SEQ ID NO: 3915 - DNA, 495 bp, Artificial Sequence
  source: /note="Description of Artificial Sequence: Synthetic polynucleotide"
gccttgccagcccgctcagatggtcaaagagtgtctcttcccataggcctcatggaagctgacatctaccagaccccaagataccttgttatagggacaggaaagaagatcactctggaatgttctcaaaccatgggccatgacaaaatgtactggtatcaacaagatccaggaatggaactacacctcatccactattcctatggagttaattccacagagaagggagatctttcctctgagtcaacagtctccagaataaggacggagcattttcccctgaccctggagtctgccaggccctcacatacctctcagtacctctgtgccagcagtgaatggtcaaagagtgtcgtcgacatcagccccagcattttggtgatgggactcgactctccatcctaggtaagttgcagaatcagggtggtatggccattgtcccttgaaggcagagttctctatggtcaaagagtgtcctgatggcgcgagggaggc

SEQ ID NO: 3916 - DNA, 495 bp, Artificial Sequence
  source: /note="Description of Artificial Sequence: Synthetic polynucleotide"
gccttgccagcccgctcagatggtcaagttccgaatcttcccataggcctcatggaagctgacatctaccagaccccaagataccttgttatagggacaggaaagaagatcactctggaatgttctcaaaccatgggccatgacaaaatgtactggtatcaacaagatccaggaatggaactacacctcatccactattcctatggagttaattccacagagaagggagatctttcctctgagtcaacagtctccagaataaggacggagcattttcccctgaccctggagtctgccaggccctcacatacctctcagtacctctgtgccagcagtgaatggtcaagttccgaagtcgacataattcacccctccactttgggaacgggaccaggctcactgtgacaggtatgggggctccactcttgactcgggggtgcctgggtttgactgcaatgatatggtcaagttccgaactgatggcgcgagggaggc

SEQ ID NO: 3917 - DNA, 495 bp, Artificial Sequence
  source: /note="Description of Artificial Sequence: Synthetic polynucleotide"
gccttgccagcccgctcagatggtcaacgttactttcttcccataggcctcatggaagctgacatctaccagaccccaagataccttgttatagggacaggaaagaagatcactctggaatgttctcaaaccatgggccatgacaaaatgtactggtatcaacaagatccaggaatggaactacacctcatccactattcctatggagttaattccacagagaagggagatctttcctctgagtcaacagtctccagaataaggacggagcattttcccctgaccctggagtctgccaggccctcacatacctctcagtacctctgtgccagcagtgaatggtcaacgttacttgtcgacacaatgagcagttcttcgggccagggacacggctcaccgtgctaggtaagaagggggctccaggtgggagagagggtgagcagcccagcctgcacgacccatggtcaacgttacttctgatggcgcgagggaggc

SEQ ID NO: 3918 - DNA, 495 bp, Artificial Sequence
  source: /note="Description of Artificial Sequence: Synthetic polynucleotide"
gccttgccagcccgctcagatggtcaataggagactcttcccataggcctcatggaagctgacatctaccagaccccaagataccttgttatagggacaggaaagaagatcactctggaatgttctcaaaccatgggccatgacaaaatgtactggtatcaacaagatccaggaatggaactacacctcatccactattcctatggagttaattccacagagaagggagatctttcctctgagtcaacagtctccagaataaggacggagcattttcccctgaccctggagtctgccaggccctcacatacctctcagtacctctgtgccagcagtgaatggtcaataggagacgtcgacaccggggagctgttttttggagaaggctctaggctgaccgtactgggtaaggaggcggttggggctccggagagctccgagagggcgggatgggcagaggatggtcaataggagacctgatggcgcgagggaggc

SEQ ID NO: 3919 - DNA, 495 bp, Artificial Sequence
  source: /note="Description of Artificial Sequence: Synthetic polynucleotide"
gccttgccagcccgctcagatggtcaagtgtctactcttcccataggcctcatggaagctgacatctaccagaccccaagataccttgttatagggacaggaaagaagatcactctggaatgttctcaaaccatgggccatgacaaaatgtactggtatcaacaagatccaggaatggaactacacctcatccactattcctatggagttaattccacagagaagggagatctttcctctgagtcaacagtctccagaataaggacggagcattttcccctgaccctggagtctgccaggccctcacatacctctcagtacctctgtgccagcagtgaatggtcaagtgtctacgtcgacagatacgcagtattttggcccaggcacccggctgacagtgctcggtaagcgggggctcccgctgaagccccggaactggggagggggcgccccgggacgcatggtcaagtgtctacctgatggcgcgagggaggc

SEQ ID NO: 3920 - DNA, 495 bp, Artificial Sequence
  source: /note="Description of Artificial Sequence: Synthetic polynucleotide"
gccttgccagcccgctcagatggtcaagtacagtgtcttcccataggcctcatggaagctgacatctaccagaccccaagataccttgttatagggacaggaaagaagatcactctggaatgttctcaaaccatgggccatgacaaaatgtactggtatcaacaagatccaggaatggaactacacctcatccactattcctatggagttaattccacagagaagggagatctttcctctgagtcaacagtctccagaataaggacggagcattttcccctgaccctggagtctgccaggccctcacatacctctcagtacctctgtgccagcagtgaatggtcaagtacagtggtcgacaaaacattcagtacttcggcgccgggacccggctctcagtgctgggtaagctggggccgccgggggaccggggacgagactgcgctcgggtttttgtgcgatggtcaagtacagtgctgatggcgcgagggaggc

SEQ ID NO: 3921 - DNA, 495 bp, Artificial Sequence
  source: /note="Description of Artificial Sequence: Synthetic polynucleotide"
gccttgccagcccgctcagatggtcaaggatcatctcttcccataggcctcatggaagctgacatctaccagaccccaagataccttgttatagggacaggaaagaagatcactctggaatgttctcaaaccatgggccatgacaaaatgtactggtatcaacaagatccaggaatggaactacacctcatccactattcctatggagttaattccacagagaagggagatctttcctctgagtcaacagtctccagaataaggacggagcattttcccctgaccctggagtctgccaggccctcacatacctctcagtacctctgtgccagcagtgaatggtcaaggatcatcgtcgacgagacccagtacttcgggccaggcacgcggctcctggtgctcggtgagcgcgggctgctggggcgcgggcgcgggcggcttgggtctggtttttgcggggatggtcaaggatcatcctgatggcgcgagggaggc

SEQ ID NO: 3922 - DNA, 495 bp, Artificial Sequence
  source: /note="Description of Artificial Sequence: Synthetic polynucleotide"
gccttgccagcccgctcagatggtcaatattggcgtcttcccataggcctcatggaagctgacatctaccagaccccaagataccttgttatagggacaggaaagaagatcactctggaatgttctcaaaccatgggccatgacaaaatgtactggtatcaacaagatccaggaatggaactacacctcatccactattcctatggagttaattccacagagaagggagatctttcctctgagtcaacagtctccagaataaggacggagcattttcccctgaccctggagtctgccaggccctcacatacctctcagtacctctgtgccagcagtgaatggtcaatattggcggtcgacgggccaacgtcctgactttcggggccggcagcaggctgaccgtgctgggtgagttttcgcgggaccacccgggcggcgggattcaggtggaaggcggcggatggtcaatattggcgctgatggcgcgagggaggc

SEQ ID NO: 3923 - DNA, 495 bp, Artificial Sequence
  source: /note="Description of Artificial Sequence: Synthetic polynucleotide"
gccttgccagcccgctcagatggtcaaaggcttgatcttcccataggcctcatggaagctgacatctaccagaccccaagataccttgttatagggacaggaaagaagatcactctggaatgttctcaaaccatgggccatgacaaaatgtactggtatcaacaagatccaggaatggaactacacctcatccactattcctatggagttaattccacagagaagggagatctttcctctgagtcaacagtctccagaataaggacggagcattttcccctgaccctggagtctgccaggccctcacatacctctcagtacctctgtgccagcagtgaatggtcaaaggcttgagtcgacacgagcagtacttcgggccgggcaccaggctcacggtcacaggtgagattcgggcgtctccccaccttccagcccctcggtccccggagtcggagggtggatggtcaaaggcttgactgatggcgcgagggaggc

SEQ ID NO: 3924 - DNA, 495 bp, Artificial Sequence
  source: /note="Description of Artificial Sequence: Synthetic polynucleotide"
gccttgccagcccgctcagcaagtcacgacactctccccccaacaggcctcaaggatgctgtagttacacaattcccaagacacagaatcattgggacaggaaaggaattcattctacagtgttcccagaatatgaatcatgttacaatgtactggtatcgacaggacccaggacttggactgaagctggtctattattcacctggcactgggagcactgaaaaaggagatatctctgaggggtatcatgtttcttgaaatactatagcatcttttcccctgaccctgaagtctgccagcaccaaccagacatctgtgtatctctatgccagcagtgacaagtcacgacactctgtcgacactgaagctttctttggacaaggcaccagactcacagttgtaggtaagacatttttcaggttcttttgcagatccgtcacagggaaaagtgggtccacagcaagtcacgacactctctgatggcgcgagggaggc

SEQ ID NO: 3925 - DNA, 495 bp, Artificial Sequence
  source: /note="Description of Artificial Sequence: Synthetic polynucleotide"
gccttgccagcccgctcagcaagtcacttcggaacccccccaacaggcctcaaggatgctgtagttacacaattcccaagacacagaatcattgggacaggaaaggaattcattctacagtgttcccagaatatgaatcatgttacaatgtactggtatcgacaggacccaggacttggactgaagctggtctattattcacctggcactgggagcactgaaaaaggagatatctctgaggggtatcatgtttcttgaaatactatagcatcttttcccctgaccctgaagtctgccagcaccaaccagacatctgtgtatctctatgccagcagtgacaagtcacttcggaacgtcgactatggctacaccttcggttcggggaccaggttaaccgttgtaggtaaggctgggggtctctaggaggggtgcgatgagggaggactctgtcctgggaaatcaagtcacttcggaacctgatggcgcgagggaggc

SEQ ID NO: 3926 - DNA, 495 bp, Artificial Sequence
  source: /note="Description of Artificial Sequence: Synthetic polynucleotide"
gccttgccagcccgctcagcaagtcacaagtaacgccccccaacaggcctcaaggatgctgtagttacacaattcccaagacacagaatcattgggacaggaaaggaattcattctacagtgttcccagaatatgaatcatgttacaatgtactggtatcgacaggacccaggacttggactgaagctggtctattattcacctggcactgggagcactgaaaaaggagatatctctgaggggtatcatgtttcttgaaatactatagcatcttttcccctgaccctgaagtctgccagcaccaaccagacatctgtgtatctctatgccagcagtgacaagtcacaagtaacggtcgacgaaacaccatatattttggagagggaagttggctcactgttgtaggtgagtaagtcaaggctggacagctgggaacttgcaaaaaggggctggaatccagcaagtcacaagtaacgctgatggcgcgagggaggc

SEQ ID NO: 3927 - DNA, 495 bp, Artificial Sequence
  source: /note="Description of Artificial Sequence: Synthetic polynucleotide"
gccttgccagcccgctcagcaagtcacgtctcctaccccccaacaggcctcaaggatgctgtagttacacaattcccaagacacagaatcattgggacaggaaaggaattcattctacagtgttcccagaatatgaatcatgttacaatgtactggtatcgacaggacccaggacttggactgaagctggtctattattcacctggcactgggagcactgaaaaaggagatatctctgaggggtatcatgtttcttgaaatactatagcatcttttcccctgaccctgaagtctgccagcaccaaccagacatctgtgtatctctatgccagcagtgacaagtcacgtctcctagtcgacaatgaaaaactgttttttggcagtggaacccagctctctgtcttgggtatgtaaaagacttctttcgggatagtgtatcataaggtcggagttccaggagcaagtcacgtctcctactgatggcgcgagggaggc

SEQ ID NO: 3928 - DNA, 495 bp, Artificial Sequence
  source: /note="Description of Artificial Sequence: Synthetic polynucleotide"
gccttgccagcccgctcagcaagtcacagagtgtcccccccaacaggcctcaaggatgctgtagttacacaattcccaagacacagaatcattgggacaggaaaggaattcattctacagtgttcccagaatatgaatcatgttacaatgtactggtatcgacaggacccaggacttggactgaagctggtctattattcacctggcactgggagcactgaaaaaggagatatctctgaggggtatcatgtttcttgaaatactatagcatcttttcccctgaccctgaagtctgccagcaccaaccagacatctgtgtatctctatgccagcagtgacaagtcacagagtgtcgtcgacatcagccccagcattttggtgatgggactcgactctccatcctaggtaagttgcagaatcagggtggtatggccattgtcccttgaaggcagagttctctcaagtcacagagtgtcctgatggcgcgagggaggc

SEQ ID NO: 3929 - DNA, 495 bp, Artificial Sequence
  source: /note="Description of Artificial Sequence: Synthetic polynucleotide"
gccttgccagcccgctcagcaagtcacgttccgaaccccccaacaggcctcaaggatgctgtagttacacaattcccaagacacagaatcattgggacaggaaaggaattcattctacagtgttcccagaatatgaatcatgttacaatgtactggtatcgacaggacccaggacttggactgaagctggtctattattcacctggcactgggagcactgaaaaaggagatatctctgaggggtatcatgtttcttgaaatactatagcatcttttcccctgaccctgaagtctgccagcaccaaccagacatctgtgtatctctatgccagcagtgacaagtcacgttccgaagtcgacataattcacccctccactttgggaacgggaccaggctcactgtgacaggtatgggggctccactcttgactcgggggtgcctgggtttgactgcaatgatcaagtcacgttccgaactgatggcgcgagggaggc

SEQ ID NO: 3930 - DNA, 495 bp, Artificial Sequence
  source: /note="Description of Artificial Sequence: Synthetic polynucleotide"
gccttgccagcccgctcagcaagtcaccgttacttccccccaacaggcctcaaggatgctgtagttacacaattcccaagacacagaatcattgggacaggaaaggaattcattctacagtgttcccagaatatgaatcatgttacaatgtactggtatcgacaggacccaggacttggactgaagctggtctattattcacctggcactgggagcactgaaaaaggagatatctctgaggggtatcatgtttcttgaaatactatagcatcttttcccctgaccctgaagtctgccagcaccaaccagacatctgtgtatctctatgccagcagtgacaagtcaccgttacttgtcgacacaatgagcagttcttcgggccagggacacggctcaccgtgctaggtaagaagggggctccaggtgggagagagggtgagcagcccagcctgcacgaccccaagtcaccgttacttctgatggcgcgagggaggc

SEQ ID NO: 3931 - DNA, 495 bp, Artificial Sequence
  source: /note="Description of Artificial Sequence: Synthetic polynucleotide"
gccttgccagcccgctcagcaagtcactaggagacccccccaacaggcctcaaggatgctgtagttacacaattcccaagacacagaatcattgggacaggaaaggaattcattctacagtgttcccagaatatgaatcatgttacaatgtactggtatcgacaggacccaggacttggactgaagctggtctattattcacctggcactgggagcactgaaaaaggagatatctctgaggggtatcatgtttcttgaaatactatagcatcttttcccctgaccctgaagtctgccagcaccaaccagacatctgtgtatctctatgccagcagtgacaagtcactaggagacgtcgacaccggggagctgttttttggagaaggctctaggctgaccgtactgggtaaggaggcggttggggctccggagagctccgagagggcgggatgggcagaggcaagtcactaggagacctgatggcgcgagggaggc

SEQ ID NO: 3932 - DNA, 495 bp, Artificial Sequence
  source: /note="Description of Artificial Sequence: Synthetic polynucleotide"
gccttgccagcccgctcagcaagtcacgtgtctacccccccaacaggcctcaaggatgctgtagttacacaattcccaagacacagaatcattgggacaggaaaggaattcattctacagtgttcccagaatatgaatcatgttacaatgtactggtatcgacaggacccaggacttggactgaagctggtctattattcacctggcactgggagcactgaaaaaggagatatctctgaggggtatcatgtttcttgaaatactatagcatcttttcccctgaccctgaagtctgccagcaccaaccagacatctgtgtatctctatgccagcagtgacaagtcacgtgtctacgtcgacagatacgcagtattttggcccaggcacccggctgacagtgctcggtaagcgggggctcccgctgaagccccggaactggggagggggcgccccgggacgccaagtcacgtgtctacctgatggcgcgagggaggc

SEQ ID NO: 3933 - DNA, 495 bp, Artificial Sequence
  source: /note="Description of Artificial Sequence: Synthetic polynucleotide"
gccttgccagcccgctcagcaagtcacgtacagtgccccccaacaggcctcaaggatgctgtagttacacaattcccaagacacagaatcattgggacaggaaaggaattcattctacagtgttcccagaatatgaatcatgttacaatgtactggtatcgacaggacccaggacttggactgaagctggtctattattcacctggcactgggagcactgaaaaaggagatatctctgaggggtatcatgtttcttgaaatactatagcatcttttcccctgaccctgaagtctgccagcaccaaccagacatctgtgtatctctatgccagcagtgacaagtcacgtacagtggtcgacaaaacattcagtacttcggcgccgggacccggctctcagtgctgggtaagctggggccgccgggggaccggggacgagactgcgctcgggtttttgtgcgcaagtcacgtacagtgctgatggcgcgagggaggc

SEQ ID NO: 3934 - DNA, 495 bp, Artificial Sequence
  source: /note="Description of Artificial Sequence: Synthetic polynucleotide"
gccttgccagcccgctcagcaagtcacggatcatcccccccaacaggcctcaaggatgctgtagttacacaattcccaagacacagaatcattgggacaggaaaggaattcattctacagtgttcccagaatatgaatcatgttacaatgtactggtatcgacaggacccaggacttggactgaagctggtctattattcacctggcactgggagcactgaaaaaggagatatctctgaggggtatcatgtttcttgaaatactatagcatcttttcccctgaccctgaagtctgccagcaccaaccagacatctgtgtatctctatgccagcagtgacaagtcacggatcatcgtcgacgagacccagtacttcgggccaggcacgcggctcctggtgctcggtgagcgcgggctgctggggcgcgggcgcgggcggcttgggtctggtttttgcggggcaagtcacggatcatcctgatggcgcgagggaggc

SEQ ID NO: 3935 - DNA, 495 bp, Artificial Sequence
  source: /note="Description of Artificial Sequence: Synthetic polynucleotide"
gccttgccagcccgctcagcaagtcactattggcgccccccaacaggcctcaaggatgctgtagttacacaattcccaagacacagaatcattgggacaggaaaggaattcattctacagtgttcccagaatatgaatcatgttacaatgtactggtatcgacaggacccaggacttggactgaagctggtctattattcacctggcactgggagcactgaaaaaggagatatctctgaggggtatcatgtttcttgaaatactatagcatcttttcccctgaccctgaagtctgccagcaccaaccagacatctgtgtatctctatgccagcagtgacaagtcactattggcggtcgacgggccaacgtcctgactttcggggccggcagcaggctgaccgtgctgggtgagttttcgcgggaccacccgggcggcgggattcaggtggaaggcggcggcaagtcactattggcgctgatggcgcgagggaggc

SEQ ID NO: 3936 - DNA, 495 bp, Artificial Sequence
  source: /note="Description of Artificial Sequence: Synthetic polynucleotide"
gccttgccagcccgctcagcaagtcacaggcttgaccccccaacaggcctcaaggatgctgtagttacacaattcccaagacacagaatcattgggacaggaaaggaattcattctacagtgttcccagaatatgaatcatgttacaatgtactggtatcgacaggacccaggacttggactgaagctggtctattattcacctggcactgggagcactgaaaaaggagatatctctgaggggtatcatgtttcttgaaatactatagcatcttttcccctgaccctgaagtctgccagcaccaaccagacatctgtgtatctctatgccagcagtgacaagtcacaggcttgagtcgacacgagcagtacttcgggccgggcaccaggctcacggtcacaggtgagattcgggcgtctccccaccttccagcccctcggtccccggagtcggagggtggcaagtcacaggcttgactgatggcgcgagggaggc

SEQ ID NO: 3937 - DNA, 495 bp, Artificial Sequence
  source: /note="Description of Artificial Sequence: Synthetic polynucleotide"
gccttgccagcccgctcaggatggcttgacactctttcctttacaggccccctggaagcccaagtgacccagaacccaagatacctcatcacagtgactggaaagaagttaacagtgacttgttctcagaatatgaaccatgagtatatgtcctggtatcgacaagacccagggctgggcttaaggcagatctactattcaatgaatgttgaggtgactgataagggagatgttcctgaagggtacaaagtctctcgaaaagagaagaggaatttccccctgatcctggagtcgcccagccccaaccagacctctctgtacttctgtgccagcagtgagatggcttgacactctgtcgacactgaagctttctttggacaaggcaccagactcacagttgtaggtaagacatttttcaggttcttttgcagatccgtcacagggaaaagtgggtccacaggatggcttgacactctctgatggcgcgagggaggc

SEQ ID NO: 3938 - DNA, 495 bp, Artificial Sequence
  source: /note="Description of Artificial Sequence: Synthetic polynucleotide"
gccttgccagcccgctcaggatggcttttcggaacttcctttacaggccccctggaagcccaagtgacccagaacccaagatacctcatcacagtgactggaaagaagttaacagtgacttgttctcagaatatgaaccatgagtatatgtcctggtatcgacaagacccagggctgggcttaaggcagatctactattcaatgaatgttgaggtgactgataagggagatgttcctgaagggtacaaagtctctcgaaaagagaagaggaatttccccctgatcctggagtcgcccagccccaaccagacctctctgtacttctgtgccagcagtgagatggcttttcggaacgtcgactatggctacaccttcggttcggggaccaggttaaccgttgtaggtaaggctgggggtctctaggaggggtgcgatgagggaggactctgtcctgggaaatgatggcttttcggaacctgatggcgcgagggaggc

SEQ ID NO: 3939 - DNA, 495 bp, Artificial Sequence
  source: /note="Description of Artificial Sequence: Synthetic polynucleotide"
gccttgccagcccgctcaggatggcttaagtaacgttcctttacaggccccctggaagcccaagtgacccagaacccaagatacctcatcacagtgactggaaagaagttaacagtgacttgttctcagaatatgaaccatgagtatatgtcctggtatcgacaagacccagggctgggcttaaggcagatctactattcaatgaatgttgaggtgactgataagggagatgttcctgaagggtacaaagtctctcgaaaagagaagaggaatttccccctgatcctggagtcgcccagccccaaccagacctctctgtacttctgtgccagcagtgagatggcttaagtaacggtcgacgaaacaccatatattttggagagggaagttggctcactgttgtaggtgagtaagtcaaggctggacagctgggaacttgcaaaaaggggctggaatccaggatggcttaagtaacgctgatggcgcgagggaggc

SEQ ID NO: 3940 - DNA, 495 bp, Artificial Sequence
  source: /note="Description of Artificial Sequence: Synthetic polynucleotide"
gccttgccagcccgctcaggatggcttgtctcctattcctttacaggccccctggaagcccaagtgacccagaacccaagatacctcatcacagtgactggaaagaagttaacagtgacttgttctcagaatatgaaccatgagtatatgtcctggtatcgacaagacccagggctgggcttaaggcagatctactattcaatgaatgttgaggtgactgataagggagatgttcctgaagggtacaaagtctctcgaaaagagaagaggaatttccccctgatcctggagtcgcccagccccaaccagacctctctgtacttctgtgccagcagtgagatggcttgtctcctagtcgacaatgaaaaactgttttttggcagtggaacccagctctctgtcttgggtatgtaaaagacttctttcgggatagtgtatcataaggtcggagttccaggaggatggcttgtctcctactgatggcgcgagggaggc

SEQ ID NO: 3941 - DNA, 495 bp, Artificial Sequence
  source: /note="Description of Artificial Sequence: Synthetic polynucleotide"
gccttgccagcccgctcaggatggcttagagtgtcttcctttacaggccccctggaagcccaagtgacccagaacccaagatacctcatcacagtgactggaaagaagttaacagtgacttgttctcagaatatgaaccatgagtatatgtcctggtatcgacaagacccagggctgggcttaaggcagatctactattcaatgaatgttgaggtgactgataagggagatgttcctgaagggtacaaagtctctcgaaaagagaagaggaatttccccctgatcctggagtcgcccagccccaaccagacctctctgtacttctgtgccagcagtgagatggcttagagtgtcgtcgacatcagccccagcattttggtgatgggactcgactctccatcctaggtaagttgcagaatcagggtggtatggccattgtcccttgaaggcagagttctctgatggcttagagtgtcctgatggcgcgagggaggc

SEQ ID NO: 3942 - DNA, 495 bp, Artificial Sequence
  source: /note="Description of Artificial Sequence: Synthetic polynucleotide"
gccttgccagcccgctcaggatggcttgttccgaattcctttacaggccccctggaagcccaagtgacccagaacccaagatacctcatcacagtgactggaaagaagttaacagtgacttgttctcagaatatgaaccatgagtatatgtcctggtatcgacaagacccagggctgggcttaaggcagatctactattcaatgaatgttgaggtgactgataagggagatgttcctgaagggtacaaagtctctcgaaaagagaagaggaatttccccctgatcctggagtcgcccagccccaaccagacctctctgtacttctgtgccagcagtgagatggcttgttccgaagtcgacataattcacccctccactttgggaacgggaccaggctcactgtgacaggtatgggggctccactcttgactcgggggtgcctgggtttgactgcaatgatgatggcttgttccgaactgatggcgcgagggaggc

SEQ ID NO: 3943 - DNA, 495 bp, Artificial Sequence
  source: /note="Description of Artificial Sequence: Synthetic polynucleotide"
gccttgccagcccgctcaggatggcttcgttacttttcctttacaggccccctggaagcccaagtgacccagaacccaagatacctcatcacagtgactggaaagaagttaacagtgacttgttctcagaatatgaaccatgagtatatgtcctggtatcgacaagacccagggctgggcttaaggcagatctactattcaatgaatgttgaggtgactgataagggagatgttcctgaagggtacaaagtctctcgaaaagagaagaggaatttccccctgatcctggagtcgcccagccccaaccagacctctctgtacttctgtgccagcagtgagatggcttcgttacttgtcgacacaatgagcagttcttcgggccagggacacggctcaccgtgctaggtaagaagggggctccaggtgggagagagggtgagcagcccagcctgcacgacccgatggcttcgttacttctgatggcgcgagggaggc

SEQ ID NO: 3944 - DNA, 495 bp, Artificial Sequence
  source: /note="Description of Artificial Sequence: Synthetic polynucleotide"
gccttgccagcccgctcaggatggctttaggagacttcctttacaggccccctggaagcccaagtgacccagaacccaagatacctcatcacagtgactggaaagaagttaacagtgacttgttctcagaatatgaaccatgagtatatgtcctggtatcgacaagacccagggctgggcttaaggcagatctactattcaatgaatgttgaggtgactgataagggagatgttcctgaagggtacaaagtctctcgaaaagagaagaggaatttccccctgatcctggagtcgcccagccccaaccagacctctctgtacttctgtgccagcagtgagatggctttaggagacgtcgacaccggggagctgttttttggagaaggctctaggctgaccgtactgggtaaggaggcggttggggctccggagagctccgagagggcgggatgggcagagggatggctttaggagacctgatggcgcgagggaggc

SEQ ID NO: 3945 - DNA, 495 bp, Artificial Sequence
  source: /note="Description of Artificial Sequence: Synthetic polynucleotide"
gccttgccagcccgctcaggatggcttgtgtctacttcctttacaggccccctggaagcccaagtgacccagaacccaagatacctcatcacagtgactggaaagaagttaacagtgacttgttctcagaatatgaaccatgagtatatgtcctggtatcgacaagacccagggctgggcttaaggcagatctactattcaatgaatgttgaggtgactgataagggagatgttcctgaagggtacaaagtctctcgaaaagagaagaggaatttccccctgatcctggagtcgcccagccccaaccagacctctctgtacttctgtgccagcagtgagatggcttgtgtctacgtcgacagatacgcagtattttggcccaggcacccggctgacagtgctcggtaagcgggggctcccgctgaagccccggaactggggagggggcgccccgggacgcgatggcttgtgtctacctgatggcgcgagggaggc

SEQ ID NO: 3946 - DNA, 495 bp, Artificial Sequence
  source: /note="Description of Artificial Sequence: Synthetic polynucleotide"
gccttgccagcccgctcaggatggcttgtacagtgttcctttacaggccccctggaagcccaagtgacccagaacccaagatacctcatcacagtgactggaaagaagttaacagtgacttgttctcagaatatgaaccatgagtatatgtcctggtatcgacaagacccagggctgggcttaaggcagatctactattcaatgaatgttgaggtgactgataagggagatgttcctgaagggtacaaagtctctcgaaaagagaagaggaatttccccctgatcctggagtcgcccagccccaaccagacctctctgtacttctgtgccagcagtgagatggcttgtacagtggtcgacaaaacattcagtacttcggcgccgggacccggctctcagtgctgggtaagctggggccgccgggggaccggggacgagactgcgctcgggtttttgtgcggatggcttgtacagtgctgatggcgcgagggaggc

SEQ ID NO: 3947 - DNA, 495 bp, Artificial Sequence
  source: /note="Description of Artificial Sequence: Synthetic polynucleotide"
gccttgccagcccgctcaggatggcttggatcatcttcctttacaggccccctggaagcccaagtgacccagaacccaagatacctcatcacagtgactggaaagaagttaacagtgacttgttctcagaatatgaaccatgagtatatgtcctggtatcgacaagacccagggctgggcttaaggcagatctactattcaatgaatgttgaggtgactgataagggagatgttcctgaagggtacaaagtctctcgaaaagagaagaggaatttccccctgatcctggagtcgcccagccccaaccagacctctctgtacttctgtgccagcagtgagatggcttggatcatcgtcgacgagacccagtacttcgggccaggcacgcggctcctggtgctcggtgagcgcgggctgctggggcgcgggcgcgggcggcttgggtctggtttttgcgggggatggcttggatcatcctgatggcgcgagggaggc

SEQ ID NO: 3948 - DNA, 495 bp, Artificial Sequence
  source: /note="Description of Artificial Sequence: Synthetic polynucleotide"
gccttgccagcccgctcaggatggctttattggcgttcctttacaggccccctggaagcccaagtgacccagaacccaagatacctcatcacagtgactggaaagaagttaacagtgacttgttctcagaatatgaaccatgagtatatgtcctggtatcgacaagacccagggctgggcttaaggcagatctactattcaatgaatgttgaggtgactgataagggagatgttcctgaagggtacaaagtctctcgaaaagagaagaggaatttccccctgatcctggagtcgcccagccccaaccagacctctctgtacttctgtgccagcagtgagatggctttattggcggtcgacgggccaacgtcctgactttcggggccggcagcaggctgaccgtgctgggtgagttttcgcgggaccacccgggcggcgggattcaggtggaaggcggcgggatggctttattggcgctgatggcgcgagggaggc

SEQ ID NO: 3949 - DNA, 495 bp, Artificial Sequence
  source: /note="Description of Artificial Sequence: Synthetic polynucleotide"
gccttgccagcccgctcaggatggcttaggcttgattcctttacaggccccctggaagcccaagtgacccagaacccaagatacctcatcacagtgactggaaagaagttaacagtgacttgttctcagaatatgaaccatgagtatatgtcctggtatcgacaagacccagggctgggcttaaggcagatctactattcaatgaatgttgaggtgactgataagggagatgttcctgaagggtacaaagtctctcgaaaagagaagaggaatttccccctgatcctggagtcgcccagccccaaccagacctctctgtacttctgtgccagcagtgagatggcttaggcttgagtcgacacgagcagtacttcgggccgggcaccaggctcacggtcacaggtgagattcgggcgtctccccaccttccagcccctcggtccccggagtcggagggtgggatggcttaggcttgactgatggcgcgagggaggc

SEQ ID NO: 3950 - DNA, 495 bp, Artificial Sequence
  source: /note="Description of Artificial Sequence: Synthetic polynucleotide"
gccttgccagcccgctcagctgcaatcgacactctgtctctcacaggcctcgtagatgtgaaagtaacccagagctcgagatatctagtcaaaaggacgggagagaaagtttttctggaatgtgtccaggatatggaccatgaaaatatgttctggtatcgacaagacccaggtctggggctacggctgatctatttctcatatgatgttaaaatgaaagaaaaaggagatattcctgaggggtacagtgtctctagagagaagaaggagcgcttctccctgattctggagtccgccagcaccaaccagacatctatgtacctctgtgccagcagtgactgcaatcgacactctgtcgacactgaagctttctttggacaaggcaccagactcacagttgtaggtaagacatttttcaggttcttttgcagatccgtcacagggaaaagtgggtccacagctgcaatcgacactctctgatggcgcgagggaggc

SEQ ID NO: 3951 - DNA, 495 bp, Artificial Sequence
  source: /note="Description of Artificial Sequence: Synthetic polynucleotide"
gccttgccagcccgctcagctgcaatcttcggaacgtctctcacaggcctcgtagatgtgaaagtaacccagagctcgagatatctagtcaaaaggacgggagagaaagtttttctggaatgtgtccaggatatggaccatgaaaatatgttctggtatcgacaagacccaggtctggggctacggctgatctatttctcatatgatgttaaaatgaaagaaaaaggagatattcctgaggggtacagtgtctctagagagaagaaggagcgcttctccctgattctggagtccgccagcaccaaccagacatctatgtacctctgtgccagcagtgactgcaatcttcggaacgtcgactatggctacaccttcggttcggggaccaggttaaccgttgtaggtaaggctgggggtctctaggaggggtgcgatgagggaggactctgtcctgggaaatctgcaatcttcggaacctgatggcgcgagggaggc

SEQ ID NO: 3952 - DNA, 495 bp, Artificial Sequence
  source: /note="Description of Artificial Sequence: Synthetic polynucleotide"
gccttgccagcccgctcagctgcaatcaagtaacggtctctcacaggcctcgtagatgtgaaagtaacccagagctcgagatatctagtcaaaaggacgggagagaaagtttttctggaatgtgtccaggatatggaccatgaaaatatgttctggtatcgacaagacccaggtctggggctacggctgatctatttctcatatgatgttaaaatgaaagaaaaaggagatattcctgaggggtacagtgtctctagagagaagaaggagcgcttctccctgattctggagtccgccagcaccaaccagacatctatgtacctctgtgccagcagtgactgcaatcaagtaacggtcgacgaaacaccatatattttggagagggaagttggctcactgttgtaggtgagtaagtcaaggctggacagctgggaacttgcaaaaaggggctggaatccagctgcaatcaagtaacgctgatggcgcgagggaggc

SEQ ID NO: 3953 - DNA, 495 bp, Artificial Sequence
  source: /note="Description of Artificial Sequence: Synthetic polynucleotide"
gccttgccagcccgctcagctgcaatcgtctcctagtctctcacaggcctcgtagatgtgaaagtaacccagagctcgagatatctagtcaaaaggacgggagagaaagtttttctggaatgtgtccaggatatggaccatgaaaatatgttctggtatcgacaagacccaggtctggggctacggctgatctatttctcatatgatgttaaaatgaaagaaaaaggagatattcctgaggggtacagtgtctctagagagaagaaggagcgcttctccctgattctggagtccgccagcaccaaccagacatctatgtacctctgtgccagcagtgactgcaatcgtctcctagtcgacaatgaaaaactgttttttggcagtggaacccagctctctgtcttgggtatgtaaaagacttctttcgggatagtgtatcataaggtcggagttccaggagctgcaatcgtctcctactgatggcgcgagggaggc

SEQ ID NO: 3954 - DNA, 495 bp, Artificial Sequence
  source: /note="Description of Artificial Sequence: Synthetic polynucleotide"
gccttgccagcccgctcagctgcaatcagagtgtcgtctctcacaggcctcgtagatgtgaaagtaacccagagctcgagatatctagtcaaaaggacgggagagaaagtttttctggaatgtgtccaggatatggaccatgaaaatatgttctggtatcgacaagacccaggtctggggctacggctgatctatttctcatatgatgttaaaatgaaagaaaaaggagatattcctgaggggtacagtgtctctagagagaagaaggagcgcttctccctgattctggagtccgccagcaccaaccagacatctatgtacctctgtgccagcagtgactgcaatcagagtgtcgtcgacatcagccccagcattttggtgatgggactcgactctccatcctaggtaagttgcagaatcagggtggtatggccattgtcccttgaaggcagagttctctctgcaatcagagtgtcctgatggcgcgagggaggc

SEQ ID NO: 3955 - DNA, 495 bp, Artificial Sequence
  source: /note="Description of Artificial Sequence: Synthetic polynucleotide"
gccttgccagcccgctcagctgcaatcgttccgaagtctctcacaggcctcgtagatgtgaaagtaacccagagctcgagatatctagtcaaaaggacgggagagaaagtttttctggaatgtgtccaggatatggaccatgaaaatatgttctggtatcgacaagacccaggtctggggctacggctgatctatttctcatatgatgttaaaatgaaagaaaaaggagatattcctgaggggtacagtgtctctagagagaagaaggagcgcttctccctgattctggagtccgccagcaccaaccagacatctatgtacctctgtgccagcagtgactgcaatcgttccgaagtcgacataattcacccctccactttgggaacgggaccaggctcactgtgacaggtatgggggctccactcttgactcgggggtgcctgggtttgactgcaatgatctgcaatcgttccgaactgatggcgcgagggaggc

SEQ ID NO: 3956 - DNA, 495 bp, Artificial Sequence
  source: /note="Description of Artificial Sequence: Synthetic polynucleotide"
gccttgccagcccgctcagctgcaatccgttacttgtctctcacaggcctcgtagatgtgaaagtaacccagagctcgagatatctagtcaaaaggacgggagagaaagtttttctggaatgtgtccaggatatggaccatgaaaatatgttctggtatcgacaagacccaggtctggggctacggctgatctatttctcatatgatgttaaaatgaaagaaaaaggagatattcctgaggggtacagtgtctctagagagaagaaggagcgcttctccctgattctggagtccgccagcaccaaccagacatctatgtacctctgtgccagcagtgactgcaatccgttacttgtcgacacaatgagcagttcttcgggccagggacacggctcaccgtgctaggtaagaagggggctccaggtgggagagagggtgagcagcccagcctgcacgacccctgcaatccgttacttctgatggcgcgagggaggc

SEQ ID NO: 3957 - DNA, 495 bp, Artificial Sequence
  source: /note="Description of Artificial Sequence: Synthetic polynucleotide"
gccttgccagcccgctcagctgcaatctaggagacgtctctcacaggcctcgtagatgtgaaagtaacccagagctcgagatatctagtcaaaaggacgggagagaaagtttttctggaatgtgtccaggatatggaccatgaaaatatgttctggtatcgacaagacccaggtctggggctacggctgatctatttctcatatgatgttaaaatgaaagaaaaaggagatattcctgaggggtacagtgtctctagagagaagaaggagcgcttctccctgattctggagtccgccagcaccaaccagacatctatgtacctctgtgccagcagtgactgcaatctaggagacgtcgacaccggggagctgttttttggagaaggctctaggctgaccgtactgggtaaggaggcggttggggctccggagagctccgagagggcgggatgggcagaggctgcaatctaggagacctgatggcgcgagggaggc

SEQ ID NO: 3958 - DNA, 495 bp, Artificial Sequence
  source: /note="Description of Artificial Sequence: Synthetic polynucleotide"
gccttgccagcccgctcagctgcaatcgtgtctacgtctctcacaggcctcgtagatgtgaaagtaacccagagctcgagatatctagtcaaaaggacgggagagaaagtttttctggaatgtgtccaggatatggaccatgaaaatatgttctggtatcgacaagacccaggtctggggctacggctgatctatttctcatatgatgttaaaatgaaagaaaaaggagatattcctgaggggtacagtgtctctagagagaagaaggagcgcttctccctgattctggagtccgccagcaccaaccagacatctatgtacctctgtgccagcagtgactgcaatcgtgtctacgtcgacagatacgcagtattttggcccaggcacccggctgacagtgctcggtaagcgggggctcccgctgaagccccggaactggggagggggcgccccgggacgcctgcaatcgtgtctacctgatggcgcgagggaggc

SEQ ID NO: 3959 - DNA, 495 bp, Artificial Sequence
  source: /note="Description of Artificial Sequence: Synthetic polynucleotide"
gccttgccagcccgctcagctgcaatcgtacagtggtctctcacaggcctcgtagatgtgaaagtaacccagagctcgagatatctagtcaaaaggacgggagagaaagtttttctggaatgtgtccaggatatggaccatgaaaatatgttctggtatcgacaagacccaggtctggggctacggctgatctatttctcatatgatgttaaaatgaaagaaaaaggagatattcctgaggggtacagtgtctctagagagaagaaggagcgcttctccctgattctggagtccgccagcaccaaccagacatctatgtacctctgtgccagcagtgactgcaatcgtacagtggtcgacaaaacattcagtacttcggcgccgggacccggctctcagtgctgggtaagctggggccgccgggggaccggggacgagactgcgctcgggtttttgtgcgctgcaatcgtacagtgctgatggcgcgagggaggc

SEQ ID NO: 3960 - DNA, 495 bp, Artificial Sequence
  source: /note="Description of Artificial Sequence: Synthetic polynucleotide"
gccttgccagcccgctcagctgcaatcggatcatcgtctctcacaggcctcgtagatgtgaaagtaacccagagctcgagatatctagtcaaaaggacgggagagaaagtttttctggaatgtgtccaggatatggaccatgaaaatatgttctggtatcgacaagacccaggtctggggctacggctgatctatttctcatatgatgttaaaatgaaagaaaaaggagatattcctgaggggtacagtgtctctagagagaagaaggagcgcttctccctgattctggagtccgccagcaccaaccagacatctatgtacctctgtgccagcagtgactgcaatcggatcatcgtcgacgagacccagtacttcgggccaggcacgcggctcctggtgctcggtgagcgcgggctgctggggcgcgggcgcgggcggcttgggtctggtttttgcggggctgcaatcggatcatcctgatggcgcgagggaggc

SEQ ID NO: 3961 - DNA, 495 bp, Artificial Sequence
  source: /note="Description of Artificial Sequence: Synthetic polynucleotide"
gccttgccagcccgctcagctgcaatctattggcggtctctcacaggcctcgtagatgtgaaagtaacccagagctcgagatatctagtcaaaaggacgggagagaaagtttttctggaatgtgtccaggatatggaccatgaaaatatgttctggtatcgacaagacccaggtctggggctacggctgatctatttctcatatgatgttaaaatgaaagaaaaaggagatattcctgaggggtacagtgtctctagagagaagaaggagcgcttctccctgattctggagtccgccagcaccaaccagacatctatgtacctctgtgccagcagtgactgcaatctattggcggtcgacgggccaacgtcctgactttcggggccggcagcaggctgaccgtgctgggtgagttttcgcgggaccacccgggcggcgggattcaggtggaaggcggcggctgcaatctattggcgctgatggcgcgagggaggc

SEQ ID NO: 3962 - DNA, 495 bp, Artificial Sequence
  source: /note="Description of Artificial Sequence: Synthetic polynucleotide"
gccttgccagcccgctcagctgcaatcaggcttgagtctctcacaggcctcgtagatgtgaaagtaacccagagctcgagatatctagtcaaaaggacgggagagaaagtttttctggaatgtgtccaggatatggaccatgaaaatatgttctggtatcgacaagacccaggtctggggctacggctgatctatttctcatatgatgttaaaatgaaagaaaaaggagatattcctgaggggtacagtgtctctagagagaagaaggagcgcttctccctgattctggagtccgccagcaccaaccagacatctatgtacctctgtgccagcagtgactgcaatcaggcttgagtcgacacgagcagtacttcgggccgggcaccaggctcacggtcacaggtgagattcgggcgtctccccaccttccagcccctcggtccccggagtcggagggtggctgcaatcaggcttgactgatggcgcgagggaggc

SEQ ID NO: 3963 - DNA, 495 bp, Artificial Sequence
  source: /note="Description of Artificial Sequence: Synthetic polynucleotide"
gccttgccagcccgctcaggtcatagtgacactctactaggctctgtgttcagtgctgtcatctctcaaaagccaagcagggatatctgtcaacgtggaacctccctgacgatccagtgtcaagtcgatagccaagtcaccatgatgttctggtaccgtcagcaacctggacagagcctgacactgatcgcaactgcaaatcagggctctgaggccacatatgagagtggatttgtcattgacaagtttcccatcagccgcccaaacctaacattctcaactctgactgtgagcaacatgagccctgaagacagcagcatatatctctgcagcgttgagtcatagtgacactctgtcgacactgaagctttctttggacaaggcaccagactcacagttgtaggtaagacatttttcaggttcttttgcagatccgtcacagggaaaagtgggtccacaggtcatagtgacactctctgatggcgcgagggaggc

SEQ ID NO: 3964 - DNA, 495 bp, Artificial Sequence
  source: /note="Description of Artificial Sequence: Synthetic polynucleotide"
gccttgccagcccgctcaggtcatagtttcggaacactaggctctgtgttcagtgctgtcatctctcaaaagccaagcagggatatctgtcaacgtggaacctccctgacgatccagtgtcaagtcgatagccaagtcaccatgatgttctggtaccgtcagcaacctggacagagcctgacactgatcgcaactgcaaatcagggctctgaggccacatatgagagtggatttgtcattgacaagtttcccatcagccgcccaaacctaacattctcaactctgactgtgagcaacatgagccctgaagacagcagcatatatctctgcagcgttgagtcatagtttcggaacgtcgactatggctacaccttcggttcggggaccaggttaaccgttgtaggtaaggctgggggtctctaggaggggtgcgatgagggaggactctgtcctgggaaatgtcatagtttcggaacctgatggcgcgagggaggc

SEQ ID NO: 3965 - DNA, 495 bp, Artificial Sequence
  source: /note="Description of Artificial Sequence: Synthetic polynucleotide"
gccttgccagcccgctcaggtcatagtaagtaacgactaggctctgtgttcagtgctgtcatctctcaaaagccaagcagggatatctgtcaacgtggaacctccctgacgatccagtgtcaagtcgatagccaagtcaccatgatgttctggtaccgtcagcaacctggacagagcctgacactgatcgcaactgcaaatcagggctctgaggccacatatgagagtggatttgtcattgacaagtttcccatcagccgcccaaacctaacattctcaactctgactgtgagcaacatgagccctgaagacagcagcatatatctctgcagcgttgagtcatagtaagtaacggtcgacgaaacaccatatattttggagagggaagttggctcactgttgtaggtgagtaagtcaaggctggacagctgggaacttgcaaaaaggggctggaatccaggtcatagtaagtaacgctgatggcgcgagggaggc

SEQ ID NO: 3966 - DNA, 495 bp, Artificial Sequence
  source: /note="Description of Artificial Sequence: Synthetic polynucleotide"
gccttgccagcccgctcaggtcatagtgtctcctaactaggctctgtgttcagtgctgtcatctctcaaaagccaagcagggatatctgtcaacgtggaacctccctgacgatccagtgtcaagtcgatagccaagtcaccatgatgttctggtaccgtcagcaacctggacagagcctgacactgatcgcaactgcaaatcagggctctgaggccacatatgagagtggatttgtcattgacaagtttcccatcagccgcccaaacctaacattctcaactctgactgtgagcaacatgagccctgaagacagcagcatatatctctgcagcgttgagtcatagtgtctcctagtcgacaatgaaaaactgttttttggcagtggaacccagctctctgtcttgggtatgtaaaagacttctttcgggatagtgtatcataaggtcggagttccaggaggtcatagtgtctcctactgatggcgcgagggaggc

SEQ ID NO: 3967 - DNA, 495 bp, Artificial Sequence
  source: /note="Description of Artificial Sequence: Synthetic polynucleotide"
gccttgccagcccgctcaggtcatagtagagtgtcactaggctctgtgttcagtgctgtcatctctcaaaagccaagcagggatatctgtcaacgtggaacctccctgacgatccagtgtcaagtcgatagccaagtcaccatgatgttctggtaccgtcagcaacctggacagagcctgacactgatcgcaactgcaaatcagggctctgaggccacatatgagagtggatttgtcattgacaagtttcccatcagccgcccaaacctaacattctcaactctgactgtgagcaacatgagccctgaagacagcagcatatatctctgcagcgttgagtcatagtagagtgtcgtcgacatcagccccagcattttggtgatgggactcgactctccatcctaggtaagttgcagaatcagggtggtatggccattgtcccttgaaggcagagttctctgtcatagtagagtgtcctgatggcgcgagggaggc

SEQ ID NO: 3968 - DNA, 495 bp, Artificial Sequence
  source: /note="Description of Artificial Sequence: Synthetic polynucleotide"
gccttgccagcccgctcaggtcatagtgttccgaaactaggctctgtgttcagtgctgtcatctctcaaaagccaagcagggatatctgtcaacgtggaacctccctgacgatccagtgtcaagtcgatagccaagtcaccatgatgttctggtaccgtcagcaacctggacagagcctgacactgatcgcaactgcaaatcagggctctgaggccacatatgagagtggatttgtcattgacaagtttcccatcagccgcccaaacctaacattctcaactctgactgtgagcaacatgagccctgaagacagcagcatatatctctgcagcgttgagtcatagtgttccgaagtcgacataattcacccctccactttgggaacgggaccaggctcactgtgacaggtatgggggctccactcttgactcgggggtgcctgggtttgactgcaatgatgtcatagtgttccgaactgatggcgcgagggaggc

SEQ ID NO: 3969 - DNA, 495 bp, Artificial Sequence
  source: /note="Description of Artificial Sequence: Synthetic polynucleotide"
gccttgccagcccgctcaggtcatagtcgttacttactaggctctgtgttcagtgctgtcatctctcaaaagccaagcagggatatctgtcaacgtggaacctccctgacgatccagtgtcaagtcgatagccaagtcaccatgatgttctggtaccgtcagcaacctggacagagcctgacactgatcgcaactgcaaatcagggctctgaggccacatatgagagtggatttgtcattgacaagtttcccatcagccgcccaaacctaacattctcaactctgactgtgagcaacatgagccctgaagacagcagcatatatctctgcagcgttgagtcatagtcgttacttgtcgacacaatgagcagttcttcgggccagggacacggctcaccgtgctaggtaagaagggggctccaggtgggagagagggtgagcagcccagcctgcacgacccgtcatagtcgttacttctgatggcgcgagggaggc

SEQ ID NO: 3970 - DNA, 495 bp, Artificial Sequence
  source: /note="Description of Artificial Sequence: Synthetic polynucleotide"
gccttgccagcccgctcaggtcatagttaggagacactaggctctgtgttcagtgctgtcatctctcaaaagccaagcagggatatctgtcaacgtggaacctccctgacgatccagtgtcaagtcgatagccaagtcaccatgatgttctggtaccgtcagcaacctggacagagcctgacactgatcgcaactgcaaatcagggctctgaggccacatatgagagtggatttgtcattgacaagtttcccatcagccgcccaaacctaacattctcaactctgactgtgagcaacatgagccctgaagacagcagcatatatctctgcagcgttgagtcatagttaggagacgtcgacaccggggagctgttttttggagaaggctctaggctgaccgtactgggtaaggaggcggttggggctccggagagctccgagagggcgggatgggcagagggtcatagttaggagacctgatggcgcgagggaggc

SEQ ID NO: 3971 - DNA, 495 bp, Artificial Sequence
  source: /note="Description of Artificial Sequence: Synthetic polynucleotide"
gccttgccagcccgctcaggtcatagtgtgtctacactaggctctgtgttcagtgctgtcatctctcaaaagccaagcagggatatctgtcaacgtggaacctccctgacgatccagtgtcaagtcgatagccaagtcaccatgatgttctggtaccgtcagcaacctggacagagcctgacactgatcgcaactgcaaatcagggctctgaggccacatatgagagtggatttgtcattgacaagtttcccatcagccgcccaaacctaacattctcaactctgactgtgagcaacatgagccctgaagacagcagcatatatctctgcagcgttgagtcatagtgtgtctacgtcgacagatacgcagtattttggcccaggcacccggctgacagtgctcggtaagcgggggctcccgctgaagccccggaactggggagggggcgccccgggacgcgtcatagtgtgtctacctgatggcgcgagggaggc

SEQ ID NO: 3972 - DNA, 495 bp, Artificial Sequence
  source: /note="Description of Artificial Sequence: Synthetic polynucleotide"
gccttgccagcccgctcaggtcatagtgtacagtgactaggctctgtgttcagtgctgtcatctctcaaaagccaagcagggatatctgtcaacgtggaacctccctgacgatccagtgtcaagtcgatagccaagtcaccatgatgttctggtaccgtcagcaacctggacagagcctgacactgatcgcaactgcaaatcagggctctgaggccacatatgagagtggatttgtcattgacaagtttcccatcagccgcccaaacctaacattctcaactctgactgtgagcaacatgagccctgaagacagcagcatatatctctgcagcgttgagtcatagtgtacagtggtcgacaaaacattcagtacttcggcgccgggacccggctctcagtgctgggtaagctggggccgccgggggaccggggacgagactgcgctcgggtttttgtgcggtcatagtgtacagtgctgatggcgcgagggaggc

SEQ ID NO: 3973 - DNA, 495 bp, Artificial Sequence
  source: /note="Description of Artificial Sequence: Synthetic polynucleotide"
gccttgccagcccgctcaggtcatagtggatcatcactaggctctgtgttcagtgctgtcatctctcaaaagccaagcagggatatctgtcaacgtggaacctccctgacgatccagtgtcaagtcgatagccaagtcaccatgatgttctggtaccgtcagcaacctggacagagcctgacactgatcgcaactgcaaatcagggctctgaggccacatatgagagtggatttgtcattgacaagtttcccatcagccgcccaaacctaacattctcaactctgactgtgagcaacatgagccctgaagacagcagcatatatctctgcagcgttgagtcatagtggatcatcgtcgacgagacccagtacttcgggccaggcacgcggctcctggtgctcggtgagcgcgggctgctggggcgcgggcgcgggcggcttgggtctggtttttgcgggggtcatagtggatcatcctgatggcgcgagggaggc

SEQ ID NO: 3974 - DNA, 495 bp, Artificial Sequence
  source: /note="Description of Artificial Sequence: Synthetic polynucleotide"
gccttgccagcccgctcaggtcatagttattggcgactaggctctgtgttcagtgctgtcatctctcaaaagccaagcagggatatctgtcaacgtggaacctccctgacgatccagtgtcaagtcgatagccaagtcaccatgatgttctggtaccgtcagcaacctggacagagcctgacactgatcgcaactgcaaatcagggctctgaggccacatatgagagtggatttgtcattgacaagtttcccatcagccgcccaaacctaacattctcaactctgactgtgagcaacatgagccctgaagacagcagcatatatctctgcagcgttgagtcatagttattggcggtcgacgggccaacgtcctgactttcggggccggcagcaggctgaccgtgctgggtgagttttcgcgggaccacccgggcggcgggattcaggtggaaggcggcgggtcatagttattggcgctgatggcgcgagggaggc

SEQ ID NO: 3975 - DNA, 495 bp, Artificial Sequence
  source: /note="Description of Artificial Sequence: Synthetic polynucleotide"
gccttgccagcccgctcaggtcatagtaggcttgaactaggctctgtgttcagtgctgtcatctctcaaaagccaagcagggatatctgtcaacgtggaacctccctgacgatccagtgtcaagtcgatagccaagtcaccatgatgttctggtaccgtcagcaacctggacagagcctgacactgatcgcaactgcaaatcagggctctgaggccacatatgagagtggatttgtcattgacaagtttcccatcagccgcccaaacctaacattctcaactctgactgtgagcaacatgagccctgaagacagcagcatatatctctgcagcgttgagtcatagtaggcttgagtcgacacgagcagtacttcgggccgggcaccaggctcacggtcacaggtgagattcgggcgtctccccaccttccagcccctcggtccccggagtcggagggtgggtcatagtaggcttgactgatggcgcgagggaggc

SEQ ID NO: 3976 - DNA, 495 bp, Artificial Sequence
  source: /note="Description of Artificial Sequence: Synthetic polynucleotide"
gccttgccagcccgctcagcacatggagacactcttatctttcccacaggggtcagatctcagactattcatcaatggccagcgaccctggtgcagcctgtgggcagcccgctctctctggagtgcactgtggagggaacatcaaaccccaacctatactggtaccgacaggctgcaggcaggggcctccagctgctcttctactccgttggtattggccagatcagctctgaggtgccccagaatctctcagcctccagaccccaggaccggcagttcatcctgagttctaagaagctccttctcagtgactctggcttctatctctgtgcctgtgacacatggagacactctgtcgacactgaagctttctttggacaaggcaccagactcacagttgtaggtaagacatttttcaggttcttttgcagatccgtcacagggaaaagtgggtccacagcacatggagacactctctgatggcgcgagggaggc

SEQ ID NO: 3977 - DNA, 495 bp, Artificial Sequence
  source: /note="Description of Artificial Sequence: Synthetic polynucleotide"
gccttgccagcccgctcagcacatggattcggaactatctttcccacaggggtcagatctcagactattcatcaatggccagcgaccctggtgcagcctgtgggcagcccgctctctctggagtgcactgtggagggaacatcaaaccccaacctatactggtaccgacaggctgcaggcaggggcctccagctgctcttctactccgttggtattggccagatcagctctgaggtgccccagaatctctcagcctccagaccccaggaccggcagttcatcctgagttctaagaagctccttctcagtgactctggcttctatctctgtgcctgtgacacatggattcggaacgtcgactatggctacaccttcggttcggggaccaggttaaccgttgtaggtaaggctgggggtctctaggaggggtgcgatgagggaggactctgtcctgggaaatcacatggattcggaacctgatggcgcgagggaggc

SEQ ID NO: 3978 - DNA, 495 bp, Artificial Sequence
  source: /note="Description of Artificial Sequence: Synthetic polynucleotide"
gccttgccagcccgctcagcacatggaaagtaacgtatctttcccacaggggtcagatctcagactattcatcaatggccagcgaccctggtgcagcctgtgggcagcccgctctctctggagtgcactgtggagggaacatcaaaccccaacctatactggtaccgacaggctgcaggcaggggcctccagctgctcttctactccgttggtattggccagatcagctctgaggtgccccagaatctctcagcctccagaccccaggaccggcagttcatcctgagttctaagaagctccttctcagtgactctggcttctatctctgtgcctgtgacacatggaaagtaacggtcgacgaaacaccatatattttggagagggaagttggctcactgttgtaggtgagtaagtcaaggctggacagctgggaacttgcaaaaaggggctggaatccagcacatggaaagtaacgctgatggcgcgagggaggc

SEQ ID NO: 3979 - DNA, 495 bp, Artificial Sequence
  source: /note="Description of Artificial Sequence: Synthetic polynucleotide"
gccttgccagcccgctcagcacatggagtctcctatatctttcccacaggggtcagatctcagactattcatcaatggccagcgaccctggtgcagcctgtgggcagcccgctctctctggagtgcactgtggagggaacatcaaaccccaacctatactggtaccgacaggctgcaggcaggggcctccagctgctcttctactccgttggtattggccagatcagctctgaggtgccccagaatctctcagcctccagaccccaggaccggcagttcatcctgagttctaagaagctccttctcagtgactctggcttctatctctgtgcctgtgacacatggagtctcctagtcgacaatgaaaaactgttttttggcagtggaacccagctctctgtcttgggtatgtaaaagacttctttcgggatagtgtatcataaggtcggagttccaggagcacatggagtctcctactgatggcgcgagggaggc

SEQ ID NO: 3980 - DNA, 495 bp, Artificial Sequence
  source: /note="Description of Artificial Sequence: Synthetic polynucleotide"
gccttgccagcccgctcagcacatggaagagtgtctatctttcccacaggggtcagatctcagactattcatcaatggccagcgaccctggtgcagcctgtgggcagcccgctctctctggagtgcactgtggagggaacatcaaaccccaacctatactggtaccgacaggctgcaggcaggggcctccagctgctcttctactccgttggtattggccagatcagctctgaggtgccccagaatctctcagcctccagaccccaggaccggcagttcatcctgagttctaagaagctccttctcagtgactctggcttctatctctgtgcctgtgacacatggaagagtgtcgtcgacatcagccccagcattttggtgatgggactcgactctccatcctaggtaagttgcagaatcagggtggtatggccattgtcccttgaaggcagagttctctcacatggaagagtgtcctgatggcgcgagggaggc

SEQ ID NO: 3981 - DNA, 495 bp, Artificial Sequence
  source: /note="Description of Artificial Sequence: Synthetic polynucleotide"
gccttgccagcccgctcagcacatggagttccgaatatctttcccacaggggtcagatctcagactattcatcaatggccagcgaccctggtgcagcctgtgggcagcccgctctctctggagtgcactgtggagggaacatcaaaccccaacctatactggtaccgacaggctgcaggcaggggcctccagctgctcttctactccgttggtattggccagatcagctctgaggtgccccagaatctctcagcctccagaccccaggaccggcagttcatcctgagttctaagaagctccttctcagtgactctggcttctatctctgtgcctgtgacacatggagttccgaagtcgacataattcacccctccactttgggaacgggaccaggctcactgtgacaggtatgggggctccactcttgactcgggggtgcctgggtttgactgcaatgatcacatggagttccgaactgatggcgcgagggaggc

SEQ ID NO: 3982 - DNA, 495 bp, Artificial Sequence
  source: /note="Description of Artificial Sequence: Synthetic polynucleotide"
gccttgccagcccgctcagcacatggacgttactttatctttcccacaggggtcagatctcagactattcatcaatggccagcgaccctggtgcagcctgtgggcagcccgctctctctggagtgcactgtggagggaacatcaaaccccaacctatactggtaccgacaggctgcaggcaggggcctccagctgctcttctactccgttggtattggccagatcagctctgaggtgccccagaatctctcagcctccagaccccaggaccggcagttcatcctgagttctaagaagctccttctcagtgactctggcttctatctctgtgcctgtgacacatggacgttacttgtcgacacaatgagcagttcttcgggccagggacacggctcaccgtgctaggtaagaagggggctccaggtgggagagagggtgagcagcccagcctgcacgaccccacatggacgttacttctgatggcgcgagggaggc

SEQ ID NO: 3983 - DNA, 495 bp, Artificial Sequence
  source: /note="Description of Artificial Sequence: Synthetic polynucleotide"
gccttgccagcccgctcagcacatggataggagactatctttcccacaggggtcagatctcagactattcatcaatggccagcgaccctggtgcagcctgtgggcagcccgctctctctggagtgcactgtggagggaacatcaaaccccaacctatactggtaccgacaggctgcaggcaggggcctccagctgctcttctactccgttggtattggccagatcagctctgaggtgccccagaatctctcagcctccagaccccaggaccggcagttcatcctgagttctaagaagctccttctcagtgactctggcttctatctctgtgcctgtgacacatggataggagacgtcgacaccggggagctgttttttggagaaggctctaggctgaccgtactgggtaaggaggcggttggggctccggagagctccgagagggcgggatgggcagaggcacatggataggagacctgatggcgcgagggaggc

SEQ ID NO: 3984 - DNA, 495 bp, Artificial Sequence
  source: /note="Description of Artificial Sequence: Synthetic polynucleotide"
gccttgccagcccgctcagcacatggagtgtctactatctttcccacaggggtcagatctcagactattcatcaatggccagcgaccctggtgcagcctgtgggcagcccgctctctctggagtgcactgtggagggaacatcaaaccccaacctatactggtaccgacaggctgcaggcaggggcctccagctgctcttctactccgttggtattggccagatcagctctgaggtgccccagaatctctcagcctccagaccccaggaccggcagttcatcctgagttctaagaagctccttctcagtgactctggcttctatctctgtgcctgtgacacatggagtgtctacgtcgacagatacgcagtattttggcccaggcacccggctgacagtgctcggtaagcgggggctcccgctgaagccccggaactggggagggggcgccccgggacgccacatggagtgtctacctgatggcgcgagggaggc

SEQ ID NO: 3985 - DNA, 495 bp, Artificial Sequence
  source: /note="Description of Artificial Sequence: Synthetic polynucleotide"
gccttgccagcccgctcagcacatggagtacagtgtatctttcccacaggggtcagatctcagactattcatcaatggccagcgaccctggtgcagcctgtgggcagcccgctctctctggagtgcactgtggagggaacatcaaaccccaacctatactggtaccgacaggctgcaggcaggggcctccagctgctcttctactccgttggtattggccagatcagctctgaggtgccccagaatctctcagcctccagaccccaggaccggcagttcatcctgagttctaagaagctccttctcagtgactctggcttctatctctgtgcctgtgacacatggagtacagtggtcgacaaaacattcagtacttcggcgccgggacccggctctcagtgctgggtaagctggggccgccgggggaccggggacgagactgcgctcgggtttttgtgcgcacatggagtacagtgctgatggcgcgagggaggc

SEQ ID NO: 3986 - DNA, 495 bp, Artificial Sequence
  source: /note="Description of Artificial Sequence: Synthetic polynucleotide"
gccttgccagcccgctcagcacatggaggatcatctatctttcccacaggggtcagatctcagactattcatcaatggccagcgaccctggtgcagcctgtgggcagcccgctctctctggagtgcactgtggagggaacatcaaaccccaacctatactggtaccgacaggctgcaggcaggggcctccagctgctcttctactccgttggtattggccagatcagctctgaggtgccccagaatctctcagcctccagaccccaggaccggcagttcatcctgagttctaagaagctccttctcagtgactctggcttctatctctgtgcctgtgacacatggaggatcatcgtcgacgagacccagtacttcgggccaggcacgcggctcctggtgctcggtgagcgcgggctgctggggcgcgggcgcgggcggcttgggtctggtttttgcggggcacatggaggatcatcctgatggcgcgagggaggc

SEQ ID NO: 3987 - DNA, 495 bp, Artificial Sequence
  source: /note="Description of Artificial Sequence: Synthetic polynucleotide"
gccttgccagcccgctcagcacatggatattggcgtatctttcccacaggggtcagatctcagactattcatcaatggccagcgaccctggtgcagcctgtgggcagcccgctctctctggagtgcactgtggagggaacatcaaaccccaacctatactggtaccgacaggctgcaggcaggggcctccagctgctcttctactccgttggtattggccagatcagctctgaggtgccccagaatctctcagcctccagaccccaggaccggcagttcatcctgagttctaagaagctccttctcagtgactctggcttctatctctgtgcctgtgacacatggatattggcggtcgacgggccaacgtcctgactttcggggccggcagcaggctgaccgtgctgggtgagttttcgcgggaccacccgggcggcgggattcaggtggaaggcggcggcacatggatattggcgctgatggcgcgagggaggc

SEQ ID NO: 3988 - DNA, 495 bp, Artificial Sequence
  source: /note="Description of Artificial Sequence: Synthetic polynucleotide"
gccttgccagcccgctcagcacatggaaggcttgatatctttcccacaggggtcagatctcagactattcatcaatggccagcgaccctggtgcagcctgtgggcagcccgctctctctggagtgcactgtggagggaacatcaaaccccaacctatactggtaccgacaggctgcaggcaggggcctccagctgctcttctactccgttggtattggccagatcagctctgaggtgccccagaatctctcagcctccagaccccaggaccggcagttcatcctgagttctaagaagctccttctcagtgactctggcttctatctctgtgcctgtgacacatggaaggcttgagtcgacacgagcagtacttcgggccgggcaccaggctcacggtcacaggtgagattcgggcgtctccccaccttccagcccctcggtccccggagtcggagggtggcacatggaaggcttgactgatggcgcgagggaggc

SEQ ID NO: 3989 - DNA, 495 bp, Artificial Sequence
  source: /note="Description of Artificial Sequence: Synthetic polynucleotide"
gccttgccagcccgctcagttgaccatgacactcttctttctgtcttctgtcccctcagctcataaaccccagctcgtagaagctgaagccacctagactctaagacacctgattgcagagacaggaaaggagttctcaagataagtgccaagatttcatactggttttcacaagaatcagggttggaattagagccgactcattattcagttaacattgacattgttgattagagacatatccctattgaaaatatttcctggcaaaaaatagaagttctctttggctctgaaatctgcaactccctttcaggtgtccctgtgtccttgtaccgtgattgaccatgacactctgtcgacactgaagctttctttggacaaggcaccagactcacagttgtaggtaagacatttttcaggttcttttgcagatccgtcacagggaaaagtgggtccacagttgaccatgacactctctgatggcgcgagggaggc

SEQ ID NO: 3990 - DNA, 495 bp, Artificial Sequence
  source: /note="Description of Artificial Sequence: Synthetic polynucleotide"
gccttgccagcccgctcagttgaccatttcggaactctttctgtcttctgtcccctcagctcataaaccccagctcgtagaagctgaagccacctagactctaagacacctgattgcagagacaggaaaggagttctcaagataagtgccaagatttcatactggttttcacaagaatcagggttggaattagagccgactcattattcagttaacattgacattgttgattagagacatatccctattgaaaatatttcctggcaaaaaatagaagttctctttggctctgaaatctgcaactccctttcaggtgtccctgtgtccttgtaccgtgattgaccatttcggaacgtcgactatggctacaccttcggttcggggaccaggttaaccgttgtaggtaaggctgggggtctctaggaggggtgcgatgagggaggactctgtcctgggaaatttgaccatttcggaacctgatggcgcgagggaggc

SEQ ID NO: 3991 - DNA, 495 bp, Artificial Sequence
  source: /note="Description of Artificial Sequence: Synthetic polynucleotide"
gccttgccagcccgctcagttgaccataagtaacgtctttctgtcttctgtcccctcagctcataaaccccagctcgtagaagctgaagccacctagactctaagacacctgattgcagagacaggaaaggagttctcaagataagtgccaagatttcatactggttttcacaagaatcagggttggaattagagccgactcattattcagttaacattgacattgttgattagagacatatccctattgaaaatatttcctggcaaaaaatagaagttctctttggctctgaaatctgcaactccctttcaggtgtccctgtgtccttgtaccgtgattgaccataagtaacggtcgacgaaacaccatatattttggagagggaagttggctcactgttgtaggtgagtaagtcaaggctggacagctgggaacttgcaaaaaggggctggaatccagttgaccataagtaacgctgatggcgcgagggaggc

SEQ ID NO: 3992 - DNA, 495 bp, Artificial Sequence
  source: /note="Description of Artificial Sequence: Synthetic polynucleotide"
gccttgccagcccgctcagttgaccatgtctcctatctttctgtcttctgtcccctcagctcataaaccccagctcgtagaagctgaagccacctagactctaagacacctgattgcagagacaggaaaggagttctcaagataagtgccaagatttcatactggttttcacaagaatcagggttggaattagagccgactcattattcagttaacattgacattgttgattagagacatatccctattgaaaatatttcctggcaaaaaatagaagttctctttggctctgaaatctgcaactccctttcaggtgtccctgtgtccttgtaccgtgattgaccatgtctcctagtcgacaatgaaaaactgttttttggcagtggaacccagctctctgtcttgggtatgtaaaagacttctttcgggatagtgtatcataaggtcggagttccaggagttgaccatgtctcctactgatggcgcgagggaggc

SEQ ID NO: 3993 - DNA, 495 bp, Artificial Sequence
  source: /note="Description of Artificial Sequence: Synthetic polynucleotide"
gccttgccagcccgctcagttgaccatagagtgtctctttctgtcttctgtcccctcagctcataaaccccagctcgtagaagctgaagccacctagactctaagacacctgattgcagagacaggaaaggagttctcaagataagtgccaagatttcatactggttttcacaagaatcagggttggaattagagccgactcattattcagttaacattgacattgttgattagagacatatccctattgaaaatatttcctggcaaaaaatagaagttctctttggctctgaaatctgcaactccctttcaggtgtccctgtgtccttgtaccgtgattgaccatagagtgtcgtcgacatcagccccagcattttggtgatgggactcgactctccatcctaggtaagttgcagaatcagggtggtatggccattgtcccttgaaggcagagttctctttgaccatagagtgtcctgatggcgcgagggaggc

SEQ ID NO: 3994 - DNA, 495 bp, Artificial Sequence
  source: /note="Description of Artificial Sequence: Synthetic polynucleotide"
gccttgccagcccgctcagttgaccatgttccgaatctttctgtcttctgtcccctcagctcataaaccccagctcgtagaagctgaagccacctagactctaagacacctgattgcagagacaggaaaggagttctcaagataagtgccaagatttcatactggttttcacaagaatcagggttggaattagagccgactcattattcagttaacattgacattgttgattagagacatatccctattgaaaatatttcctggcaaaaaatagaagttctctttggctctgaaatctgcaactccctttcaggtgtccctgtgtccttgtaccgtgattgaccatgttccgaagtcgacataattcacccctccactttgggaacgggaccaggctcactgtgacaggtatgggggctccactcttgactcgggggtgcctgggtttgactgcaatgatttgaccatgttccgaactgatggcgcgagggaggc

SEQ ID NO: 3995 - DNA, 495 bp, Artificial Sequence
  source: /note="Description of Artificial Sequence: Synthetic polynucleotide"
gccttgccagcccgctcagttgaccatcgttactttctttctgtcttctgtcccctcagctcataaaccccagctcgtagaagctgaagccacctagactctaagacacctgattgcagagacaggaaaggagttctcaagataagtgccaagatttcatactggttttcacaagaatcagggttggaattagagccgactcattattcagttaacattgacattgttgattagagacatatccctattgaaaatatttcctggcaaaaaatagaagttctctttggctctgaaatctgcaactccctttcaggtgtccctgtgtccttgtaccgtgattgaccatcgttacttgtcgacacaatgagcagttcttcgggccagggacacggctcaccgtgctaggtaagaagggggctccaggtgggagagagggtgagcagcccagcctgcacgacccttgaccatcgttacttctgatggcgcgagggaggc

SEQ ID NO: 3996 - DNA, 495 bp, Artificial Sequence
  source: /note="Description of Artificial Sequence: Synthetic polynucleotide"
gccttgccagcccgctcagttgaccattaggagactctttctgtcttctgtcccctcagctcataaaccccagctcgtagaagctgaagccacctagactctaagacacctgattgcagagacaggaaaggagttctcaagataagtgccaagatttcatactggttttcacaagaatcagggttggaattagagccgactcattattcagttaacattgacattgttgattagagacatatccctattgaaaatatttcctggcaaaaaatagaagttctctttggctctgaaatctgcaactccctttcaggtgtccctgtgtccttgtaccgtgattgaccattaggagacgtcgacaccggggagctgttttttggagaaggctctaggctgaccgtactgggtaaggaggcggttggggctccggagagctccgagagggcgggatgggcagaggttgaccattaggagacctgatggcgcgagggaggc

SEQ ID NO: 3997 - DNA, 495 bp, Artificial Sequence
  source: /note="Description of Artificial Sequence: Synthetic polynucleotide"
gccttgccagcccgctcagttgaccatgtgtctactctttctgtcttctgtcccctcagctcataaaccccagctcgtagaagctgaagccacctagactctaagacacctgattgcagagacaggaaaggagttctcaagataagtgccaagatttcatactggttttcacaagaatcagggttggaattagagccgactcattattcagttaacattgacattgttgattagagacatatccctattgaaaatatttcctggcaaaaaatagaagttctctttggctctgaaatctgcaactccctttcaggtgtccctgtgtccttgtaccgtgattgaccatgtgtctacgtcgacagatacgcagtattttggcccaggcacccggctgacagtgctcggtaagcgggggctcccgctgaagccccggaactggggagggggcgccccgggacgcttgaccatgtgtctacctgatggcgcgagggaggc

SEQ ID NO: 3998 - DNA, 495 bp, Artificial Sequence
  source: /note="Description of Artificial Sequence: Synthetic polynucleotide"
gccttgccagcccgctcagttgaccatgtacagtgtctttctgtcttctgtcccctcagctcataaaccccagctcgtagaagctgaagccacctagactctaagacacctgattgcagagacaggaaaggagttctcaagataagtgccaagatttcatactggttttcacaagaatcagggttggaattagagccgactcattattcagttaacattgacattgttgattagagacatatccctattgaaaatatttcctggcaaaaaatagaagttctctttggctctgaaatctgcaactccctttcaggtgtccctgtgtccttgtaccgtgattgaccatgtacagtggtcgacaaaacattcagtacttcggcgccgggacccggctctcagtgctgggtaagctggggccgccgggggaccggggacgagactgcgctcgggtttttgtgcgttgaccatgtacagtgctgatggcgcgagggaggc

SEQ ID NO: 3999 - DNA, 495 bp, Artificial Sequence
  source: /note="Description of Artificial Sequence: Synthetic polynucleotide"
gccttgccagcccgctcagttgaccatggatcatctctttctgtcttctgtcccctcagctcataaaccccagctcgtagaagctgaagccacctagactctaagacacctgattgcagagacaggaaaggagttctcaagataagtgccaagatttcatactggttttcacaagaatcagggttggaattagagccgactcattattcagttaacattgacattgttgattagagacatatccctattgaaaatatttcctggcaaaaaatagaagttctctttggctctgaaatctgcaactccctttcaggtgtccctgtgtccttgtaccgtgattgaccatggatcatcgtcgacgagacccagtacttcgggccaggcacgcggctcctggtgctcggtgagcgcgggctgctggggcgcgggcgcgggcggcttgggtctggtttttgcggggttgaccatggatcatcctgatggcgcgagggaggc

SEQ ID NO: 4000 - DNA, 495 bp, Artificial Sequence
  source: /note="Description of Artificial Sequence: Synthetic polynucleotide"
gccttgccagcccgctcagttgaccattattggcgtctttctgtcttctgtcccctcagctcataaaccccagctcgtagaagctgaagccacctagactctaagacacctgattgcagagacaggaaaggagttctcaagataagtgccaagatttcatactggttttcacaagaatcagggttggaattagagccgactcattattcagttaacattgacattgttgattagagacatatccctattgaaaatatttcctggcaaaaaatagaagttctctttggctctgaaatctgcaactccctttcaggtgtccctgtgtccttgtaccgtgattgaccattattggcggtcgacgggccaacgtcctgactttcggggccggcagcaggctgaccgtgctgggtgagttttcgcgggaccacccgggcggcgggattcaggtggaaggcggcggttgaccattattggcgctgatggcgcgagggaggc

SEQ ID NO: 4001 - DNA, 495 bp, Artificial Sequence
  source: /note="Description of Artificial Sequence: Synthetic polynucleotide"
gccttgccagcccgctcagttgaccataggcttgatctttctgtcttctgtcccctcagctcataaaccccagctcgtagaagctgaagccacctagactctaagacacctgattgcagagacaggaaaggagttctcaagataagtgccaagatttcatactggttttcacaagaatcagggttggaattagagccgactcattattcagttaacattgacattgttgattagagacatatccctattgaaaatatttcctggcaaaaaatagaagttctctttggctctgaaatctgcaactccctttcaggtgtccctgtgtccttgtaccgtgattgaccataggcttgagtcgacacgagcagtacttcgggccgggcaccaggctcacggtcacaggtgagattcgggcgtctccccaccttccagcccctcggtccccggagtcggagggtggttgaccataggcttgactgatggcgcgagggaggc

SEQ ID NO: 4002 - DNA, 495 bp, Artificial Sequence
  source: /note="Description of Artificial Sequence: Synthetic polynucleotide"
gccttgccagcccgctcaggtgacttggacactctcagaccctgagatgaggcaggaaagttgtatcggaatgttttcagactatcaaccagaccaaacgttctggaatccataagatccagggctggggataaatttaatctattaattattcttctgaagttggcagctttgaaaaagatgccctgagtcagcatagtcattctaaccaaaaagaaaaaagggaaaaaataatcatctttcccaacccttaaatcgtccagcactaaccagactctgagaccctctgcagcagcagcctatcagtgcagccacatcctctctgagcggatatgtgagtgacttggacactctgtcgacactgaagctttctttggacaaggcaccagactcacagttgtaggtaagacatttttcaggttcttttgcagatccgtcacagggaaaagtgggtccacaggtgacttggacactctctgatggcgcgagggaggc

SEQ ID NO: 4003 - DNA, 495 bp, Artificial Sequence
  source: /note="Description of Artificial Sequence: Synthetic polynucleotide"
gccttgccagcccgctcaggtgacttgttcggaaccagaccctgagatgaggcaggaaagttgtatcggaatgttttcagactatcaaccagaccaaacgttctggaatccataagatccagggctggggataaatttaatctattaattattcttctgaagttggcagctttgaaaaagatgccctgagtcagcatagtcattctaaccaaaaagaaaaaagggaaaaaataatcatctttcccaacccttaaatcgtccagcactaaccagactctgagaccctctgcagcagcagcctatcagtgcagccacatcctctctgagcggatatgtgagtgacttgttcggaacgtcgactatggctacaccttcggttcggggaccaggttaaccgttgtaggtaaggctgggggtctctaggaggggtgcgatgagggaggactctgtcctgggaaatgtgacttgttcggaacctgatggcgcgagggaggc

SEQ ID NO: 4004 - DNA, 495 bp, Artificial Sequence
  source: /note="Description of Artificial Sequence: Synthetic polynucleotide"
gccttgccagcccgctcaggtgacttgaagtaacgcagaccctgagatgaggcaggaaagttgtatcggaatgttttcagactatcaaccagaccaaacgttctggaatccataagatccagggctggggataaatttaatctattaattattcttctgaagttggcagctttgaaaaagatgccctgagtcagcatagtcattctaaccaaaaagaaaaaagggaaaaaataatcatctttcccaacccttaaatcgtccagcactaaccagactctgagaccctctgcagcagcagcctatcagtgcagccacatcctctctgagcggatatgtgagtgacttgaagtaacggtcgacgaaacaccatatattttggagagggaagttggctcactgttgtaggtgagtaagtcaaggctggacagctgggaacttgcaaaaaggggctggaatccaggtgacttgaagtaacgctgatggcgcgagggaggc

SEQ ID NO: 4005 - DNA, 495 bp, Artificial Sequence
  source: /note="Description of Artificial Sequence: Synthetic polynucleotide"
gccttgccagcccgctcaggtgacttggtctcctacagaccctgagatgaggcaggaaagttgtatcggaatgttttcagactatcaaccagaccaaacgttctggaatccataagatccagggctggggataaatttaatctattaattattcttctgaagttggcagctttgaaaaagatgccctgagtcagcatagtcattctaaccaaaaagaaaaaagggaaaaaataatcatctttcccaacccttaaatcgtccagcactaaccagactctgagaccctctgcagcagcagcctatcagtgcagccacatcctctctgagcggatatgtgagtgacttggtctcctagtcgacaatgaaaaactgttttttggcagtggaacccagctctctgtcttgggtatgtaaaagacttctttcgggatagtgtatcataaggtcggagttccaggaggtgacttggtctcctactgatggcgcgagggaggc

SEQ ID NO: 4006 - DNA, 495 bp, Artificial Sequence
  source: /note="Description of Artificial Sequence: Synthetic polynucleotide"
gccttgccagcccgctcaggtgacttgagagtgtccagaccctgagatgaggcaggaaagttgtatcggaatgttttcagactatcaaccagaccaaacgttctggaatccataagatccagggctggggataaatttaatctattaattattcttctgaagttggcagctttgaaaaagatgccctgagtcagcatagtcattctaaccaaaaagaaaaaagggaaaaaataatcatctttcccaacccttaaatcgtccagcactaaccagactctgagaccctctgcagcagcagcctatcagtgcagccacatcctctctgagcggatatgtgagtgacttgagagtgtcgtcgacatcagccccagcattttggtgatgggactcgactctccatcctaggtaagttgcagaatcagggtggtatggccattgtcccttgaaggcagagttctctgtgacttgagagtgtcctgatggcgcgagggaggc

SEQ ID NO: 4007 - DNA, 495 bp, Artificial Sequence
  source: /note="Description of Artificial Sequence: Synthetic polynucleotide"
gccttgccagcccgctcaggtgacttggttccgaacagaccctgagatgaggcaggaaagttgtatcggaatgttttcagactatcaaccagaccaaacgttctggaatccataagatccagggctggggataaatttaatctattaattattcttctgaagttggcagctttgaaaaagatgccctgagtcagcatagtcattctaaccaaaaagaaaaaagggaaaaaataatcatctttcccaacccttaaatcgtccagcactaaccagactctgagaccctctgcagcagcagcctatcagtgcagccacatcctctctgagcggatatgtgagtgacttggttccgaagtcgacataattcacccctccactttgggaacgggaccaggctcactgtgacaggtatgggggctccactcttgactcgggggtgcctgggtttgactgcaatgatgtgacttggttccgaactgatggcgcgagggaggc

SEQ ID NO: 4008 - DNA, 495 bp, Artificial Sequence
  source: /note="Description of Artificial Sequence: Synthetic polynucleotide"
gccttgccagcccgctcaggtgacttgcgttacttcagaccctgagatgaggcaggaaagttgtatcggaatgttttcagactatcaaccagaccaaacgttctggaatccataagatccagggctggggataaatttaatctattaattattcttctgaagttggcagctttgaaaaagatgccctgagtcagcatagtcattctaaccaaaaagaaaaaagggaaaaaataatcatctttcccaacccttaaatcgtccagcactaaccagactctgagaccctctgcagcagcagcctatcagtgcagccacatcctctctgagcggatatgtgagtgacttgcgttacttgtcgacacaatgagcagttcttcgggccagggacacggctcaccgtgctaggtaagaagggggctccaggtgggagagagggtgagcagcccagcctgcacgacccgtgacttgcgttacttctgatggcgcgagggaggc

SEQ ID NO: 4009 - DNA, 495 bp, Artificial Sequence
  source: /note="Description of Artificial Sequence: Synthetic polynucleotide"
gccttgccagcccgctcaggtgacttgtaggagaccagaccctgagatgaggcaggaaagttgtatcggaatgttttcagactatcaaccagaccaaacgttctggaatccataagatccagggctggggataaatttaatctattaattattcttctgaagttggcagctttgaaaaagatgccctgagtcagcatagtcattctaaccaaaaagaaaaaagggaaaaaataatcatctttcccaacccttaaatcgtccagcactaaccagactctgagaccctctgcagcagcagcctatcagtgcagccacatcctctctgagcggatatgtgagtgacttgtaggagacgtcgacaccggggagctgttttttggagaaggctctaggctgaccgtactgggtaaggaggcggttggggctccggagagctccgagagggcgggatgggcagagggtgacttgtaggagacctgatggcgcgagggaggc

SEQ ID NO: 4010 - DNA, 495 bp, Artificial Sequence
  source: /note="Description of Artificial Sequence: Synthetic polynucleotide"
gccttgccagcccgctcaggtgacttggtgtctaccagaccctgagatgaggcaggaaagttgtatcggaatgttttcagactatcaaccagaccaaacgttctggaatccataagatccagggctggggataaatttaatctattaattattcttctgaagttggcagctttgaaaaagatgccctgagtcagcatagtcattctaaccaaaaagaaaaaagggaaaaaataatcatctttcccaacccttaaatcgtccagcactaaccagactctgagaccctctgcagcagcagcctatcagtgcagccacatcctctctgagcggatatgtgagtgacttggtgtctacgtcgacagatacgcagtattttggcccaggcacccggctgacagtgctcggtaagcgggggctcccgctgaagccccggaactggggagggggcgccccgggacgcgtgacttggtgtctacctgatggcgcgagggaggc

SEQ ID NO: 4011 - DNA, 495 bp, Artificial Sequence
  source: /note="Description of Artificial Sequence: Synthetic polynucleotide"
gccttgccagcccgctcaggtgacttggtacagtgcagaccctgagatgaggcaggaaagttgtatcggaatgttttcagactatcaaccagaccaaacgttctggaatccataagatccagggctggggataaatttaatctattaattattcttctgaagttggcagctttgaaaaagatgccctgagtcagcatagtcattctaaccaaaaagaaaaaagggaaaaaataatcatctttcccaacccttaaatcgtccagcactaaccagactctgagaccctctgcagcagcagcctatcagtgcagccacatcctctctgagcggatatgtgagtgacttggtacagtggtcgacaaaacattcagtacttcggcgccgggacccggctctcagtgctgggtaagctggggccgccgggggaccggggacgagactgcgctcgggtttttgtgcggtgacttggtacagtgctgatggcgcgagggaggc

SEQ ID NO: 4012 - DNA, 495 bp, Artificial Sequence
  source: /note="Description of Artificial Sequence: Synthetic polynucleotide"
gccttgccagcccgctcaggtgacttgggatcatccagaccctgagatgaggcaggaaagttgtatcggaatgttttcagactatcaaccagaccaaacgttctggaatccataagatccagggctggggataaatttaatctattaattattcttctgaagttggcagctttgaaaaagatgccctgagtcagcatagtcattctaaccaaaaagaaaaaagggaaaaaataatcatctttcccaacccttaaatcgtccagcactaaccagactctgagaccctctgcagcagcagcctatcagtgcagccacatcctctctgagcggatatgtgagtgacttgggatcatcgtcgacgagacccagtacttcgggccaggcacgcggctcctggtgctcggtgagcgcgggctgctggggcgcgggcgcgggcggcttgggtctggtttttgcgggggtgacttgggatcatcctgatggcgcgagggaggc

SEQ ID NO: 4013 - DNA, 495 bp, Artificial Sequence
  source: /note="Description of Artificial Sequence: Synthetic polynucleotide"
gccttgccagcccgctcaggtgacttgtattggcgcagaccctgagatgaggcaggaaagttgtatcggaatgttttcagactatcaaccagaccaaacgttctggaatccataagatccagggctggggataaatttaatctattaattattcttctgaagttggcagctttgaaaaagatgccctgagtcagcatagtcattctaaccaaaaagaaaaaagggaaaaaataatcatctttcccaacccttaaatcgtccagcactaaccagactctgagaccctctgcagcagcagcctatcagtgcagccacatcctctctgagcggatatgtgagtgacttgtattggcggtcgacgggccaacgtcctgactttcggggccggcagcaggctgaccgtgctgggtgagttttcgcgggaccacccgggcggcgggattcaggtggaaggcggcgggtgacttgtattggcgctgatggcgcgagggaggc

SEQ ID NO: 4014 - DNA, 495 bp, Artificial Sequence
  source: /note="Description of Artificial Sequence: Synthetic polynucleotide"
gccttgccagcccgctcaggtgacttgaggcttgacagaccctgagatgaggcaggaaagttgtatcggaatgttttcagactatcaaccagaccaaacgttctggaatccataagatccagggctggggataaatttaatctattaattattcttctgaagttggcagctttgaaaaagatgccctgagtcagcatagtcattctaaccaaaaagaaaaaagggaaaaaataatcatctttcccaacccttaaatcgtccagcactaaccagactctgagaccctctgcagcagcagcctatcagtgcagccacatcctctctgagcggatatgtgagtgacttgaggcttgagtcgacacgagcagtacttcgggccgggcaccaggctcacggtcacaggtgagattcgggcgtctccccaccttccagcccctcggtccccggagtcggagggtgggtgacttgaggcttgactgatggcgcgagggaggc

SEQ ID NO: 4015 - DNA, 495 bp, Artificial Sequence; identical to SEQ ID NO: 1561
  source: /note="Description of Artificial Sequence: Synthetic polynucleotide"

SEQ ID NO: 4016 - DNA, 495 bp, Artificial Sequence; identical to SEQ ID NO: 1562
  source: /note="Description of Artificial Sequence: Synthetic polynucleotide"

SEQ ID NO: 4017 - DNA, 495 bp, Artificial Sequence; identical to SEQ ID NO: 1563
  source: /note="Description of Artificial Sequence: Synthetic polynucleotide"

SEQ ID NO: 4018 - DNA, 495 bp, Artificial Sequence; identical to SEQ ID NO: 1564
  source: /note="Description of Artificial Sequence: Synthetic polynucleotide"

SEQ ID NO: 4019 - DNA, 495 bp, Artificial Sequence; identical to SEQ ID NO: 1565
  source: /note="Description of Artificial Sequence: Synthetic polynucleotide"

SEQ ID NO: 4020 - DNA, 495 bp, Artificial Sequence; identical to SEQ ID NO: 1566
  source: /note="Description of Artificial Sequence: Synthetic polynucleotide"

SEQ ID NO: 4021 - DNA, 495 bp, Artificial Sequence; identical to SEQ ID NO: 1567
  source: /note="Description of Artificial Sequence: Synthetic polynucleotide"

SEQ ID NO: 4022 - DNA, 495 bp, Artificial Sequence; identical to SEQ ID NO: 1568
  source: /note="Description of Artificial Sequence: Synthetic polynucleotide"

SEQ ID NO: 4023 - DNA, 495 bp, Artificial Sequence; identical to SEQ ID NO: 1569
  source: /note="Description of Artificial Sequence: Synthetic polynucleotide"

SEQ ID NO: 4024 - DNA, 495 bp, Artificial Sequence; identical to SEQ ID NO: 1570
  source: /note="Description of Artificial Sequence: Synthetic polynucleotide"

SEQ ID NO: 4025 - DNA, 495 bp, Artificial Sequence; identical to SEQ ID NO: 1571
  source: /note="Description of Artificial Sequence: Synthetic polynucleotide"

SEQ ID NO: 4026 - DNA, 495 bp, Artificial Sequence; identical to SEQ ID NO: 1572
  source: /note="Description of Artificial Sequence: Synthetic polynucleotide"

SEQ ID NO: 4027 - DNA, 495 bp, Artificial Sequence; identical to SEQ ID NO: 1573
  source: /note="Description of Artificial Sequence: Synthetic polynucleotide"

SEQ ID NO: 4028 - DNA, 495 bp, Artificial Sequence; identical to SEQ ID NO: 1574
  source: /note="Description of Artificial Sequence: Synthetic polynucleotide"

SEQ ID NO: 4029 - DNA, 495 bp, Artificial Sequence; identical to SEQ ID NO: 1575
  source: /note="Description of Artificial Sequence: Synthetic polynucleotide"

SEQ ID NO: 4030 - DNA, 495 bp, Artificial Sequence; identical to SEQ ID NO: 1576
  source: /note="Description of Artificial Sequence: Synthetic polynucleotide"

SEQ ID NO: 4031 - DNA, 495 bp, Artificial Sequence; identical to SEQ ID NO: 1577
  source: /note="Description of Artificial Sequence: Synthetic polynucleotide"

SEQ ID NO: 4032 - DNA, 495 bp, Artificial Sequence; identical to SEQ ID NO: 1578
  source: /note="Description of Artificial Sequence: Synthetic polynucleotide"

SEQ ID NO: 4033 - DNA, 495 bp, Artificial Sequence; identical to SEQ ID NO: 1579
  source: /note="Description of Artificial Sequence: Synthetic polynucleotide"

SEQ ID NO: 4034 - DNA, 495 bp, Artificial Sequence; identical to SEQ ID NO: 1580
  source: /note="Description of Artificial Sequence: Synthetic polynucleotide"

SEQ ID NO: 4035 - DNA, 495 bp, Artificial Sequence; identical to SEQ ID NO: 1581
  source: /note="Description of Artificial Sequence: Synthetic polynucleotide"

SEQ ID NO: 4036 - DNA, 495 bp, Artificial Sequence; identical to SEQ ID NO: 1582
  source: /note="Description of Artificial Sequence: Synthetic polynucleotide"

SEQ ID NO: 4037 - DNA, 495 bp, Artificial Sequence; identical to SEQ ID NO: 1583
  source: /note="Description of Artificial Sequence: Synthetic polynucleotide"

SEQ ID NO: 4038 - DNA, 495 bp, Artificial Sequence; identical to SEQ ID NO: 1584
  source: /note="Description of Artificial Sequence: Synthetic polynucleotide"

SEQ ID NO: 4039 - DNA, 495 bp, Artificial Sequence; identical to SEQ ID NO: 1585
  source: /note="Description of Artificial Sequence: Synthetic polynucleotide"

SEQ ID NO: 4040 - DNA, 495 bp, Artificial Sequence; identical to SEQ ID NO: 1586
  source: /note="Description of Artificial Sequence: Synthetic polynucleotide"

SEQ ID NO: 4041 - DNA, 495 bp, Artificial Sequence; identical to SEQ ID NO: 1587
  source: /note="Description of Artificial Sequence: Synthetic polynucleotide"

SEQ ID NO: 4042 - DNA, 495 bp, Artificial Sequence; identical to SEQ ID NO: 1588
  source: /note="Description of Artificial Sequence: Synthetic polynucleotide"

SEQ ID NO: 4043 - DNA, 495 bp, Artificial Sequence; identical to SEQ ID NO: 1589
  source: /note="Description of Artificial Sequence: Synthetic polynucleotide"

SEQ ID NO: 4044 - DNA, 495 bp, Artificial Sequence; identical to SEQ ID NO: 1590
  source: /note="Description of Artificial Sequence: Synthetic polynucleotide"

SEQ ID NO: 4045 - DNA, 495 bp, Artificial Sequence; identical to SEQ ID NO: 1591
  source: /note="Description of Artificial Sequence: Synthetic polynucleotide"

SEQ ID NO: 4046 - DNA, 495 bp, Artificial Sequence; identical to SEQ ID NO: 1592
  source: /note="Description of Artificial Sequence: Synthetic polynucleotide"

SEQ ID NO: 4047 - DNA, 495 bp, Artificial Sequence; identical to SEQ ID NO: 1593
  source: /note="Description of Artificial Sequence: Synthetic polynucleotide"

SEQ ID NO: 4048 - DNA, 495 bp, Artificial Sequence; identical to SEQ ID NO: 1594
  source: /note="Description of Artificial Sequence: Synthetic polynucleotide"

SEQ ID NO: 4049 - DNA, 495 bp, Artificial Sequence; identical to SEQ ID NO: 1595
  source: /note="Description of Artificial Sequence: Synthetic polynucleotide"

SEQ ID NO: 4050 - DNA, 495 bp, Artificial Sequence; identical to SEQ ID NO: 1596
  source: /note="Description of Artificial Sequence: Synthetic polynucleotide"

SEQ ID NO: 4051 - DNA, 495 bp, Artificial Sequence; identical to SEQ ID NO: 1597
  source: /note="Description of Artificial Sequence: Synthetic polynucleotide"

SEQ ID NO: 4052 - DNA, 495 bp, Artificial Sequence; identical to SEQ ID NO: 1598
  source: /note="Description of Artificial Sequence: Synthetic polynucleotide"

SEQ ID NO: 4053 - DNA, 495 bp, Artificial Sequence; identical to SEQ ID NO: 1599
  source: /note="Description of Artificial Sequence: Synthetic polynucleotide"

SEQ ID NO: 4054 - DNA, 495 bp, Artificial Sequence; identical to SEQ ID NO: 1600
  source: /note="Description of Artificial Sequence: Synthetic polynucleotide"

SEQ ID NO: 4055 - DNA, 495 bp, Artificial Sequence; identical to SEQ ID NO: 1601
  source: /note="Description of Artificial Sequence: Synthetic polynucleotide"

SEQ ID NO: 4056 - DNA, 495 bp, Artificial Sequence; identical to SEQ ID NO: 1602
  source: /note="Description of Artificial Sequence: Synthetic polynucleotide"

SEQ ID NO: 4057 - DNA, 495 bp, Artificial Sequence; identical to SEQ ID NO: 1603
  source: /note="Description of Artificial Sequence: Synthetic polynucleotide"

SEQ ID NO: 4058 - DNA, 495 bp, Artificial Sequence; identical to SEQ ID NO: 1604
  source: /note="Description of Artificial Sequence: Synthetic polynucleotide"

SEQ ID NO: 4059 - DNA, 495 bp, Artificial Sequence; identical to SEQ ID NO: 1605
  source: /note="Description of Artificial Sequence: Synthetic polynucleotide"

SEQ ID NO: 4060 - DNA, 495 bp, Artificial Sequence; identical to SEQ ID NO: 1606
  source: /note="Description of Artificial Sequence: Synthetic polynucleotide"

SEQ ID NO: 4061 - DNA, 495 bp, Artificial Sequence; identical to SEQ ID NO: 1607
  source: /note="Description of Artificial Sequence: Synthetic polynucleotide"

SEQ ID NO: 4062 - DNA, 495 bp, Artificial Sequence; identical to SEQ ID NO: 1608
  source: /note="Description of Artificial Sequence: Synthetic polynucleotide"

SEQ ID NO: 4063 - DNA, 495 bp, Artificial Sequence; identical to SEQ ID NO: 1609
  source: /note="Description of Artificial Sequence: Synthetic polynucleotide"

SEQ ID NO: 4064 - DNA, 495 bp, Artificial Sequence; identical to SEQ ID NO: 1610
  source: /note="Description of Artificial Sequence: Synthetic polynucleotide"

SEQ ID NO: 4065 - DNA, 495 bp, Artificial Sequence; identical to SEQ ID NO: 1611
  source: /note="Description of Artificial Sequence: Synthetic polynucleotide"

SEQ ID NO: 4066 - DNA, 495 bp, Artificial Sequence; identical to SEQ ID NO: 1612
  source: /note="Description of Artificial Sequence: Synthetic polynucleotide"

SEQ ID NO: 4067 - DNA, 495 bp, Artificial Sequence; identical to SEQ ID NO: 1613
  source: /note="Description of Artificial Sequence: Synthetic polynucleotide"

SEQ ID NO: 4068 - DNA, 495 bp, Artificial Sequence; identical to SEQ ID NO: 1614
  source: /note="Description of Artificial Sequence: Synthetic polynucleotide"

SEQ ID NO: 4069 - DNA, 495 bp, Artificial Sequence; identical to SEQ ID NO: 1615
  source: /note="Description of Artificial Sequence: Synthetic polynucleotide"

SEQ ID NO: 4070 - DNA, 495 bp, Artificial Sequence; identical to SEQ ID NO: 1616
  source: /note="Description of Artificial Sequence: Synthetic polynucleotide"

SEQ ID NO: 4071 - DNA, 495 bp, Artificial Sequence; identical to SEQ ID NO: 1617
  source: /note="Description of Artificial Sequence: Synthetic polynucleotide"

SEQ ID NO: 4072 - DNA, 495 bp, Artificial Sequence; identical to SEQ ID NO: 1618
  source: /note="Description of Artificial Sequence: Synthetic polynucleotide"

SEQ ID NO: 4073 - DNA, 495 bp, Artificial Sequence; identical to SEQ ID NO: 1619
  source: /note="Description of Artificial Sequence: Synthetic polynucleotide"

SEQ ID NO: 4074 - DNA, 495 bp, Artificial Sequence; identical to SEQ ID NO: 1620
  source: /note="Description of Artificial Sequence: Synthetic polynucleotide"

SEQ ID NO: 4075 - DNA, 495 bp, Artificial Sequence; identical to SEQ ID NO: 1621
  source: /note="Description of Artificial Sequence: Synthetic polynucleotide"

SEQ ID NO: 4076 - DNA, 495 bp, Artificial Sequence; identical to SEQ ID NO: 1622
  source: /note="Description of Artificial Sequence: Synthetic polynucleotide"

SEQ ID NO: 4077 - DNA, 495 bp, Artificial Sequence; identical to SEQ ID NO: 1623
  source: /note="Description of Artificial Sequence: Synthetic polynucleotide"

SEQ ID NO: 4078 - DNA, 495 bp, Artificial Sequence; identical to SEQ ID NO: 1624
  source: /note="Description of Artificial Sequence: Synthetic polynucleotide"

SEQ ID NO: 4079 - DNA, 495 bp, Artificial Sequence; identical to SEQ ID NO: 1625
  source: /note="Description of Artificial Sequence: Synthetic polynucleotide"

SEQ ID NO: 4080 - DNA, 495 bp, Artificial Sequence; identical to SEQ ID NO: 1626
  source: /note="Description of Artificial Sequence: Synthetic polynucleotide"

SEQ ID NO: 4081 - DNA, 495 bp, Artificial Sequence; identical to SEQ ID NO: 1627
  source: /note="Description of Artificial Sequence: Synthetic polynucleotide"

SEQ ID NO: 4082 - DNA, 495 bp, Artificial Sequence; identical to SEQ ID NO: 1628
  source: /note="Description of Artificial Sequence: Synthetic polynucleotide"

SEQ ID NO: 4083 - DNA, 495 bp, Artificial Sequence; identical to SEQ ID NO: 1629
  source: /note="Description of Artificial Sequence: Synthetic polynucleotide"

SEQ ID NO: 4084 - DNA, 495 bp, Artificial Sequence; identical to SEQ ID NO: 1630
  source: /note="Description of Artificial Sequence: Synthetic polynucleotide"

SEQ ID NO: 4085 - DNA, 495 bp, Artificial Sequence; identical to SEQ ID NO: 1805
  source: /note="Description of Artificial Sequence: Synthetic polynucleotide"

SEQ ID NO: 4086 - DNA, 495 bp, Artificial Sequence; identical to SEQ ID NO: 1806
  source: /note="Description of Artificial Sequence: Synthetic polynucleotide"

SEQ ID NO: 4087 - DNA, 495 bp, Artificial Sequence; identical to SEQ ID NO: 1807
  source: /note="Description of Artificial Sequence: Synthetic polynucleotide"

SEQ ID NO: 4088 - DNA, 495 bp, Artificial Sequence; identical to SEQ ID NO: 1808
  source: /note="Description of Artificial Sequence: Synthetic polynucleotide"

SEQ ID NO: 4089 - DNA, 495 bp, Artificial Sequence; identical to SEQ ID NO: 1809
  source: /note="Description of Artificial Sequence: Synthetic polynucleotide"

SEQ ID NO: 4090 - DNA, 495 bp, Artificial Sequence; identical to SEQ ID NO: 1810
  source: /note="Description of Artificial Sequence: Synthetic polynucleotide"

SEQ ID NO: 4091 - DNA, 495 bp, Artificial Sequence; identical to SEQ ID NO: 1811
  source: /note="Description of Artificial Sequence: Synthetic polynucleotide"

SEQ ID NO: 4092 - DNA, 495 bp, Artificial Sequence; identical to SEQ ID NO: 1812
  source: /note="Description of Artificial Sequence: Synthetic polynucleotide"

SEQ ID NO: 4093 - DNA, 495 bp, Artificial Sequence; identical to SEQ ID NO: 1813
  source: /note="Description of Artificial Sequence: Synthetic polynucleotide"

SEQ ID NO: 4094 - DNA, 495 bp, Artificial Sequence; identical to SEQ ID NO: 1814
  source: /note="Description of Artificial Sequence: Synthetic polynucleotide"

SEQ ID NO: 4095 - DNA, 495 bp, Artificial Sequence; identical to SEQ ID NO: 1815
  source: /note="Description of Artificial Sequence: Synthetic polynucleotide"

SEQ ID NO: 4096 - DNA, 495 bp, Artificial Sequence; identical to SEQ ID NO: 1816
  source: /note="Description of Artificial Sequence: Synthetic polynucleotide"

SEQ ID NO: 4097 - DNA, 495 bp, Artificial Sequence; identical to SEQ ID NO: 1817
  source: /note="Description of Artificial Sequence: Synthetic polynucleotide"

SEQ ID NO: 4098 - DNA, 495 bp, Artificial Sequence; identical to SEQ ID NO: 1818
  source: /note="Description of Artificial Sequence: Synthetic polynucleotide"

SEQ ID NO: 4099 - DNA, 495 bp, Artificial Sequence; identical to SEQ ID NO: 1819
  source: /note="Description of Artificial Sequence: Synthetic polynucleotide"

SEQ ID NO: 4100 - DNA, 495 bp, Artificial Sequence; identical to SEQ ID NO: 1820
  source: /note="Description of Artificial Sequence: Synthetic polynucleotide"

SEQ ID NO: 4101 - DNA, 495 bp, Artificial Sequence; identical to SEQ ID NO: 1821
  source: /note="Description of Artificial Sequence: Synthetic polynucleotide"

SEQ ID NO: 4102 - DNA, 495 bp, Artificial Sequence; identical to SEQ ID NO: 1822
  source: /note="Description of Artificial Sequence: Synthetic polynucleotide"

SEQ ID NO: 4103 - DNA, 495 bp, Artificial Sequence; identical to SEQ ID NO: 1823
  source: /note="Description of Artificial Sequence: Synthetic polynucleotide"

SEQ ID NO: 4104 - DNA, 495 bp, Artificial Sequence; identical to SEQ ID NO: 1824
  source: /note="Description of Artificial Sequence: Synthetic polynucleotide"

SEQ ID NO: 4105 - DNA, 495 bp, Artificial Sequence; identical to SEQ ID NO: 1825
  source: /note="Description of Artificial Sequence: Synthetic polynucleotide"

SEQ ID NO: 4106 - DNA, 495 bp, Artificial Sequence; identical to SEQ ID NO: 1826
  source: /note="Description of Artificial Sequence: Synthetic polynucleotide"

SEQ ID NO: 4107 - DNA, 495 bp, Artificial Sequence; identical to SEQ ID NO: 1827
  source: /note="Description of Artificial Sequence: Synthetic polynucleotide"

SEQ ID NO: 4108 - DNA, 495 bp, Artificial Sequence; identical to SEQ ID NO: 1828
  source: /note="Description of Artificial Sequence: Synthetic polynucleotide"

SEQ ID NO: 4109 - DNA, 495 bp, Artificial Sequence; identical to SEQ ID NO: 1829
  source: /note="Description of Artificial Sequence: Synthetic polynucleotide"

SEQ ID NO: 4110 - DNA, 495 bp, Artificial Sequence; identical to SEQ ID NO: 1830
  source: /note="Description of Artificial Sequence: Synthetic polynucleotide"

SEQ ID NO: 4111 - DNA, 495 bp, Artificial Sequence; identical to SEQ ID NO: 1831
  source: /note="Description of Artificial Sequence: Synthetic polynucleotide"

SEQ ID NO: 4112 - DNA, 495 bp, Artificial Sequence; identical to SEQ ID NO: 1832
  source: /note="Description of Artificial Sequence: Synthetic polynucleotide"

SEQ ID NO: 4113 - DNA, 495 bp, Artificial Sequence; identical to SEQ ID NO: 1833
  source: /note="Description of Artificial Sequence: Synthetic polynucleotide"

SEQ ID NO: 4114 - DNA, 495 bp, Artificial Sequence; identical to SEQ ID NO: 1834
  source: /note="Description of Artificial Sequence: Synthetic polynucleotide"

SEQ ID NO: 4115 - DNA, 495 bp, Artificial Sequence; identical to SEQ ID NO: 1835
  source: /note="Description of Artificial Sequence: Synthetic polynucleotide"

SEQ ID NO: 4116 - DNA, 495 bp, Artificial Sequence; identical to SEQ ID NO: 1836
  source: /note="Description of Artificial Sequence: Synthetic polynucleotide"

SEQ ID NO: 4117 - DNA, 495 bp, Artificial Sequence; identical to SEQ ID NO: 1837
  source: /note="Description of Artificial Sequence: Synthetic polynucleotide"

SEQ ID NO: 4118 - DNA, 495 bp, Artificial Sequence; identical to SEQ ID NO: 1838
  source: /note="Description of Artificial Sequence: Synthetic polynucleotide"

SEQ ID NO: 4119 - DNA, 495 bp, Artificial Sequence; identical to SEQ ID NO: 1839
  source: /note="Description of Artificial Sequence: Synthetic polynucleotide"

SEQ ID NO: 4120 - DNA, 495 bp, Artificial Sequence; identical to SEQ ID NO: 1840
  source: /note="Description of Artificial Sequence: Synthetic polynucleotide"

SEQ ID NO: 4121 - DNA, 495 bp, Artificial Sequence; identical to SEQ ID NO: 1841
  source: /note="Description of Artificial Sequence: Synthetic polynucleotide"

SEQ ID NO: 4122 - DNA, 495 bp, Artificial Sequence; identical to SEQ ID NO: 1842
  source: /note="Description of Artificial Sequence: Synthetic polynucleotide"

SEQ ID NO: 4123 - DNA, 495 bp, Artificial Sequence; identical to SEQ ID NO: 1843
  source: /note="Description of Artificial Sequence: Synthetic polynucleotide"

SEQ ID NO: 4124 - DNA, 495 bp, Artificial Sequence; identical to SEQ ID NO: 1844
  source: /note="Description of Artificial Sequence: Synthetic polynucleotide"

SEQ ID NO: 4125 - DNA, 495 bp, Artificial Sequence; identical to SEQ ID NO: 1845
  source: /note="Description of Artificial Sequence: Synthetic polynucleotide"

SEQ ID NO: 4126 - DNA, 495 bp, Artificial Sequence; identical to SEQ ID NO: 1846
  source: /note="Description of Artificial Sequence: Synthetic polynucleotide"

SEQ ID NO: 4127 - DNA, 495 bp, Artificial Sequence; identical to SEQ ID NO: 1847
  source: /note="Description of Artificial Sequence: Synthetic polynucleotide"

SEQ ID NO: 4128 - DNA, 495 bp, Artificial Sequence; identical to SEQ ID NO: 1848
  source: /note="Description of Artificial Sequence: Synthetic polynucleotide"

SEQ ID NO: 4129 - DNA, 495 bp, Artificial Sequence; identical to SEQ ID NO: 1849
  source: /note="Description of Artificial Sequence: Synthetic polynucleotide"

SEQ ID NO: 4130 - DNA, 495 bp, Artificial Sequence; identical to SEQ ID NO: 1850
  source: /note="Description of Artificial Sequence: Synthetic polynucleotide"

SEQ ID NO: 4131 - DNA, 495 bp, Artificial Sequence; identical to SEQ ID NO: 1851
  source: /note="Description of Artificial Sequence: Synthetic polynucleotide"

SEQ ID NO: 4132 - DNA, 495 bp, Artificial Sequence; identical to SEQ ID NO: 1852
  source: /note="Description of Artificial Sequence: Synthetic polynucleotide"

SEQ ID NO: 4133 - DNA, 495 bp, Artificial Sequence; identical to SEQ ID NO: 1853
  source: /note="Description of Artificial Sequence: Synthetic polynucleotide"

SEQ ID NO: 4134 - DNA, 495 bp, Artificial Sequence; identical to SEQ ID NO: 1854
  source: /note="Description of Artificial Sequence: Synthetic polynucleotide"

SEQ ID NO: 4135 - DNA, 495 bp, Artificial Sequence; identical to SEQ ID NO: 1855
  source: /note="Description of Artificial Sequence: Synthetic polynucleotide"

SEQ ID NO: 4136 - DNA, 495 bp, Artificial Sequence; identical to SEQ ID NO: 1856
  source: /note="Description of Artificial Sequence: Synthetic polynucleotide"

SEQ ID NO: 4137 - DNA, 495 bp, Artificial Sequence; identical to SEQ ID NO: 1857
  source: /note="Description of Artificial Sequence: Synthetic polynucleotide"

SEQ ID NO: 4138 - DNA, 495 bp, Artificial Sequence; identical to SEQ ID NO: 1858
  source: /note="Description of Artificial Sequence: Synthetic polynucleotide"

SEQ ID NO: 4139 - DNA, 495 bp, Artificial Sequence; identical to SEQ ID NO: 1859
  source: /note="Description of Artificial Sequence: Synthetic polynucleotide"

SEQ ID NO: 4140 - DNA, 495 bp, Artificial Sequence; identical to SEQ ID NO: 1860
  source: /note="Description of Artificial Sequence: Synthetic polynucleotide"

SEQ ID NO: 4141 - DNA, 495 bp, Artificial Sequence; identical to SEQ ID NO: 1861
  source: /note="Description of Artificial Sequence: Synthetic polynucleotide"

SEQ ID NO: 4142 - DNA, 495 bp, Artificial Sequence; identical to SEQ ID NO: 1862
  source: /note="Description of Artificial Sequence: Synthetic polynucleotide"

SEQ ID NO: 4143 - DNA, 495 bp, Artificial Sequence; identical to SEQ ID NO: 1863
  source: /note="Description of Artificial Sequence: Synthetic polynucleotide"

SEQ ID NO: 4144 - DNA, 495 bp, Artificial Sequence; identical to SEQ ID NO: 1864
  source: /note="Description of Artificial Sequence: Synthetic polynucleotide"

SEQ ID NO: 4145 - DNA, 495 bp, Artificial Sequence; identical to SEQ ID NO: 1865
  source: /note="Description of Artificial Sequence: Synthetic polynucleotide"

SEQ ID NO: 4146 - DNA, 495 bp, Artificial Sequence; identical to SEQ ID NO: 1866
  source: /note="Description of Artificial Sequence: Synthetic polynucleotide"

SEQ ID NO: 4147 - DNA, 495 bp, Artificial Sequence; identical to SEQ ID NO: 1867
  source: /note="Description of Artificial Sequence: Synthetic polynucleotide"

SEQ ID NO: 4148 - DNA, 495 bp, Artificial Sequence; identical to SEQ ID NO: 1868
  source: /note="Description of Artificial Sequence: Synthetic polynucleotide"

SEQ ID NO: 4149 - DNA, 495 bp, Artificial Sequence; identical to SEQ ID NO: 1869
  source: /note="Description of Artificial Sequence: Synthetic polynucleotide"

SEQ ID NO: 4150 - DNA, 495 bp, Artificial Sequence; identical to SEQ ID NO: 1870
  source: /note="Description of Artificial Sequence: Synthetic polynucleotide"

SEQ ID NO: 4151 - DNA, 495 bp, Artificial Sequence; identical to SEQ ID NO: 1871
  source: /note="Description of Artificial Sequence: Synthetic polynucleotide"

SEQ ID NO: 4152 - DNA, 495 bp, Artificial Sequence; identical to SEQ ID NO: 1872
  source: /note="Description of Artificial Sequence: Synthetic polynucleotide"

SEQ ID NO: 4153 - DNA, 495 bp, Artificial Sequence; identical to SEQ ID NO: 1873
  source: /note="Description of Artificial Sequence: Synthetic polynucleotide"

SEQ ID NO: 4154 - DNA, 495 bp, Artificial Sequence; identical to SEQ ID NO: 1874
  source: /note="Description of Artificial Sequence: Synthetic polynucleotide"

SEQ ID NO: 4155 - DNA, 495 bp, Artificial Sequence; identical to SEQ ID NO: 1875
  source: /note="Description of Artificial Sequence: Synthetic polynucleotide"

SEQ ID NO: 4156 - DNA, 495 bp, Artificial Sequence; identical to SEQ ID NO: 1876
  source: /note="Description of Artificial Sequence: Synthetic polynucleotide"

SEQ ID NO: 4157 - DNA, 495 bp, Artificial Sequence; identical to SEQ ID NO: 1877
  source: /note="Description of Artificial Sequence: Synthetic polynucleotide"

SEQ ID NO: 4158 - DNA, 495 bp, Artificial Sequence; identical to SEQ ID NO: 1878
  source: /note="Description of Artificial Sequence: Synthetic polynucleotide"

SEQ ID NO: 4159 - DNA, 495 bp, Artificial Sequence; identical to SEQ ID NO: 1879
  source: /note="Description of Artificial Sequence: Synthetic polynucleotide"

SEQ ID NO: 4160 - DNA, 495 bp, Artificial Sequence; identical to SEQ ID NO: 1880
  source: /note="Description of Artificial Sequence: Synthetic polynucleotide"

SEQ ID NO: 4161 - DNA, 495 bp, Artificial Sequence; identical to SEQ ID NO: 1881
  source: /note="Description of Artificial Sequence: Synthetic polynucleotide"

SEQ ID NO: 4162 - DNA, 495 bp, Artificial Sequence; identical to SEQ ID NO: 1882
  source: /note="Description of Artificial Sequence: Synthetic polynucleotide"

SEQ ID NO: 4163 - DNA, 495 bp, Artificial Sequence; identical to SEQ ID NO: 1883
  source: /note="Description of Artificial Sequence: Synthetic polynucleotide"

SEQ ID NO: 4164 - DNA, 495 bp, Artificial Sequence; identical to SEQ ID NO: 1884
  source: /note="Description of Artificial Sequence: Synthetic polynucleotide"

SEQ ID NO: 4165 - DNA, 495 bp, Artificial Sequence; identical to SEQ ID NO: 1885
  source: /note="Description of Artificial Sequence: Synthetic polynucleotide"

SEQ ID NO: 4166 - DNA, 495 bp, Artificial Sequence; identical to SEQ ID NO: 1886
  source: /note="Description of Artificial Sequence: Synthetic polynucleotide"

SEQ ID NO: 4167 - DNA, 495 bp, Artificial Sequence; identical to SEQ ID NO: 1887
  source: /note="Description of Artificial Sequence: Synthetic polynucleotide"

SEQ ID NO: 4168 - DNA, 495 bp, Artificial Sequence; identical to SEQ ID NO: 1888
  source: /note="Description of Artificial Sequence: Synthetic polynucleotide"

SEQ ID NO: 4169 - DNA, 495 bp, Artificial Sequence; identical to SEQ ID NO: 1889
  source: /note="Description of Artificial Sequence: Synthetic polynucleotide"

SEQ ID NO: 4170 - DNA, 495 bp, Artificial Sequence; identical to SEQ ID NO: 1890
  source: /note="Description of Artificial Sequence: Synthetic polynucleotide"

SEQ ID NO: 4171 - DNA, 495 bp, Artificial Sequence; identical to SEQ ID NO: 1891
  source: /note="Description of Artificial Sequence: Synthetic polynucleotide"

SEQ ID NO: 4172 - DNA, 495 bp, Artificial Sequence; identical to SEQ ID NO: 1892
  source: /note="Description of Artificial Sequence: Synthetic polynucleotide"

SEQ ID NO: 4173 - DNA, 495 bp, Artificial Sequence; identical to SEQ ID NO: 1893
  source: /note="Description of Artificial Sequence: Synthetic polynucleotide"

SEQ ID NO: 4174 - DNA, 495 bp, Artificial Sequence; identical to SEQ ID NO: 1894
  source: /note="Description of Artificial Sequence: Synthetic polynucleotide"

SEQ ID NO: 4175 - DNA, 495 bp, Artificial Sequence; identical to SEQ ID NO: 1895
  source: /note="Description of Artificial Sequence: Synthetic polynucleotide"

SEQ ID NO: 4176 - DNA, 495 bp, Artificial Sequence; identical to SEQ ID NO: 1896
  source: /note="Description of Artificial Sequence: Synthetic polynucleotide"

SEQ ID NO: 4177 - DNA, 495 bp, Artificial Sequence; identical to SEQ ID NO: 1897
  source: /note="Description of Artificial Sequence: Synthetic polynucleotide"

SEQ ID NO: 4178 - DNA, 495 bp, Artificial Sequence; identical to SEQ ID NO: 1898
  source: /note="Description of Artificial Sequence: Synthetic polynucleotide"

SEQ ID NO: 4179 - DNA, 495 bp, Artificial Sequence; identical to SEQ ID NO: 1899
  source: /note="Description of Artificial Sequence: Synthetic polynucleotide"

SEQ ID NO: 4180 - DNA, 495 bp, Artificial Sequence; identical to SEQ ID NO: 1900
  source: /note="Description of Artificial Sequence: Synthetic polynucleotide"

SEQ ID NO: 4181 - DNA, 495 bp, Artificial Sequence; identical to SEQ ID NO: 1901
  source: /note="Description of Artificial Sequence: Synthetic polynucleotide"

SEQ ID NO: 4182 - DNA, 495 bp, Artificial Sequence; identical to SEQ ID NO: 1902
  source: /note="Description of Artificial Sequence: Synthetic polynucleotide"

SEQ ID NO: 4183 - DNA, 495 bp, Artificial Sequence; identical to SEQ ID NO: 1903
  source: /note="Description of Artificial Sequence: Synthetic polynucleotide"

SEQ ID NO: 4184 - DNA, 495 bp, Artificial Sequence; identical to SEQ ID NO: 1904
  source: /note="Description of Artificial Sequence: Synthetic polynucleotide"

SEQ ID NO: 4185 - DNA, 495 bp, Artificial Sequence; identical to SEQ ID NO: 1905
  source: /note="Description of Artificial Sequence: Synthetic polynucleotide"

SEQ ID NO: 4186 - DNA, 495 bp, Artificial Sequence; identical to SEQ ID NO: 1906
  source: /note="Description of Artificial Sequence: Synthetic polynucleotide"

SEQ ID NO: 4187 - DNA, 495 bp, Artificial Sequence; identical to SEQ ID NO: 1907
  source: /note="Description of Artificial Sequence: Synthetic polynucleotide"

SEQ ID NO: 4188 - DNA, 495 bp, Artificial Sequence; identical to SEQ ID NO: 1908
  source: /note="Description of Artificial Sequence: Synthetic polynucleotide"

SEQ ID NO: 4189 - DNA, 495 bp, Artificial Sequence; identical to SEQ ID NO: 1909
  source: /note="Description of Artificial Sequence: Synthetic polynucleotide"

SEQ ID NO: 4190 - DNA, 495 bp, Artificial Sequence; identical to SEQ ID NO: 1910
  source: /note="Description of Artificial Sequence: Synthetic polynucleotide"

SEQ ID NO: 4191 - DNA, 495 bp, Artificial Sequence; identical to SEQ ID NO: 1911
  source: /note="Description of Artificial Sequence: Synthetic polynucleotide"

SEQ ID NO: 4192 - DNA, 495 bp, Artificial Sequence; identical to SEQ ID NO: 1912
  source: /note="Description of Artificial Sequence: Synthetic polynucleotide"

SEQ ID NO: 4193 - DNA, 495 bp, Artificial Sequence; identical to SEQ ID NO: 1913
  source: /note="Description of Artificial Sequence: Synthetic polynucleotide"

SEQ ID NO: 4194 - DNA, 495 bp, Artificial Sequence; identical to SEQ ID NO: 1914
  source: /note="Description of Artificial Sequence: Synthetic polynucleotide"

SEQ ID NO: 4195 - DNA, 495 bp, Artificial Sequence; identical to SEQ ID NO: 1915
  source: /note="Description of Artificial Sequence: Synthetic polynucleotide"

SEQ ID NO: 4196 - DNA, 495 bp, Artificial Sequence; identical to SEQ ID NO: 1916
  source: /note="Description of Artificial Sequence: Synthetic polynucleotide"

SEQ ID NO: 4197 - DNA, 495 bp, Artificial Sequence; identical to SEQ ID NO: 1917
  source: /note="Description of Artificial Sequence: Synthetic polynucleotide"

SEQ ID NO: 4198 - DNA, 495 bp, Artificial Sequence; identical to SEQ ID NO: 1918
  source: /note="Description of Artificial Sequence: Synthetic polynucleotide"

SEQ ID NO: 4199 - DNA, 495 bp, Artificial Sequence; identical to SEQ ID NO: 1919
  source: /note="Description of Artificial Sequence: Synthetic polynucleotide"

SEQ ID NO: 4200 - DNA, 495 bp, Artificial Sequence; identical to SEQ ID NO: 1920
  source: /note="Description of Artificial Sequence: Synthetic polynucleotide"

SEQ ID NO: 4201 - DNA, 495 bp, Artificial Sequence; identical to SEQ ID NO: 1921
  source: /note="Description of Artificial Sequence: Synthetic polynucleotide"

SEQ ID NO: 4202 - DNA, 495 bp, Artificial Sequence; identical to SEQ ID NO: 1922
  source: /note="Description of Artificial Sequence: Synthetic polynucleotide"

SEQ ID NO: 4203 - DNA, 495 bp, Artificial Sequence; identical to SEQ ID NO: 1923
  source: /note="Description of Artificial Sequence: Synthetic polynucleotide"

SEQ ID NO: 4204 - DNA, 495 bp, Artificial Sequence; identical to SEQ ID NO: 1924
  source: /note="Description of Artificial Sequence: Synthetic polynucleotide"

SEQ ID NO: 4205 - DNA, 495 bp, Artificial Sequence; identical to SEQ ID NO: 1925
  source: /note="Description of Artificial Sequence: Synthetic polynucleotide"

SEQ ID NO: 4206 - DNA, 495 bp, Artificial Sequence; identical to SEQ ID NO: 1926
  source: /note="Description of Artificial Sequence: Synthetic polynucleotide"

SEQ ID NO: 4207 - DNA, 448 bp, Artificial Sequence; identical to SEQ ID NO: 1927
  source: /note="Description of Artificial Sequence: Synthetic polynucleotide"

SEQ ID NO: 4208 - DNA, 495 bp, Artificial Sequence; identical to SEQ ID NO: 1928
  source: /note="Description of Artificial Sequence: Synthetic polynucleotide"

SEQ ID NO: 4209 - DNA, 495 bp, Artificial Sequence; identical to SEQ ID NO: 1929
  source: /note="Description of Artificial Sequence: Synthetic polynucleotide"

SEQ ID NO: 4210 - DNA, 495 bp, Artificial Sequence; identical to SEQ ID NO: 1930
  source: /note="Description of Artificial Sequence: Synthetic polynucleotide"

SEQ ID NO: 4211 - DNA, 495 bp, Artificial Sequence; identical to SEQ ID NO: 1931
  source: /note="Description of Artificial Sequence: Synthetic polynucleotide"

SEQ ID NO: 4212 - DNA, 495 bp, Artificial Sequence; identical to SEQ ID NO: 1932
  source: /note="Description of Artificial Sequence: Synthetic polynucleotide"

SEQ ID NO: 4213 - DNA, 495 bp, Artificial Sequence; identical to SEQ ID NO: 1933
  source: /note="Description of Artificial Sequence: Synthetic polynucleotide"

SEQ ID NO: 4214 - DNA, 495 bp, Artificial Sequence; identical to SEQ ID NO: 1934
  source: /note="Description of Artificial Sequence: Synthetic polynucleotide"

SEQ ID NO: 4215 - DNA, 495 bp, Artificial Sequence; identical to SEQ ID NO: 1935
  source: /note="Description of Artificial Sequence: Synthetic polynucleotide"

SEQ ID NO: 4216 - DNA, 495 bp, Artificial Sequence; identical to SEQ ID NO: 1936
  source: /note="Description of Artificial Sequence: Synthetic polynucleotide"

SEQ ID NO: 4217 - DNA, 495 bp, Artificial Sequence; identical to SEQ ID NO: 1937
  source: /note="Description of Artificial Sequence: Synthetic polynucleotide"

SEQ ID NO: 4218 - DNA, 495 bp, Artificial Sequence; identical to SEQ ID NO: 1938
  source: /note="Description of Artificial Sequence: Synthetic polynucleotide"

SEQ ID NO: 4219 - DNA, 495 bp, Artificial Sequence; identical to SEQ ID NO: 1939
  source: /note="Description of Artificial Sequence: Synthetic polynucleotide"

SEQ ID NO: 4220 - DNA, 495 bp, Artificial Sequence; identical to SEQ ID NO: 1940
  source: /note="Description of Artificial Sequence: Synthetic polynucleotide"

SEQ ID NO: 4221 - DNA, 495 bp, Artificial Sequence; identical to SEQ ID NO: 1941
  source: /note="Description of Artificial Sequence: Synthetic polynucleotide"

SEQ ID NO: 4222 - DNA, 495 bp, Artificial Sequence; identical to SEQ ID NO: 1942
  source: /note="Description of Artificial Sequence: Synthetic polynucleotide"

SEQ ID NO: 4223 - DNA, 495 bp, Artificial Sequence; identical to SEQ ID NO: 1943
  source: /note="Description of Artificial Sequence: Synthetic polynucleotide"

SEQ ID NO: 4224 - DNA, 495 bp, Artificial Sequence; identical to SEQ ID NO: 1944
  source: /note="Description of Artificial Sequence: Synthetic polynucleotide"

SEQ ID NO: 4225 - DNA, 495 bp, Artificial Sequence; identical to SEQ ID NO: 1945
  source: /note="Description of Artificial Sequence: Synthetic polynucleotide"

SEQ ID NO: 4226 - DNA, 495 bp, Artificial Sequence; identical to SEQ ID NO: 1946
  source: /note="Description of Artificial Sequence: Synthetic polynucleotide"

SEQ ID NO: 4227 - DNA, 495 bp, Artificial Sequence; identical to SEQ ID NO: 1947
  source: /note="Description of Artificial Sequence: Synthetic polynucleotide"

SEQ ID NO: 4228 - DNA, 495 bp, Artificial Sequence; identical to SEQ ID NO: 1948
  source: /note="Description of Artificial Sequence: Synthetic polynucleotide"

SEQ ID NO: 4229 - DNA, 495 bp, Artificial Sequence; identical to SEQ ID NO: 1949
  source: /note="Description of Artificial Sequence: Synthetic polynucleotide"

SEQ ID NO: 4230 - DNA, 495 bp, Artificial Sequence; identical to SEQ ID NO: 1950
  source: /note="Description of Artificial Sequence: Synthetic polynucleotide"

SEQ ID NO: 4231 - DNA, 495 bp, Artificial Sequence; identical to SEQ ID NO: 1951
  source: /note="Description of Artificial Sequence: Synthetic polynucleotide"

SEQ ID NO: 4232 - DNA, 495 bp, Artificial Sequence; identical to SEQ ID NO: 1952
  source: /note="Description of Artificial Sequence: Synthetic polynucleotide"

SEQ ID NO: 4233 - DNA, 495 bp, Artificial Sequence; identical to SEQ ID NO: 1953
  source: /note="Description of Artificial Sequence: Synthetic polynucleotide"

SEQ ID NO: 4234 - DNA, 495 bp, Artificial Sequence; identical to SEQ ID NO: 1954
  source: /note="Description of Artificial Sequence: Synthetic polynucleotide"

SEQ ID NO: 4235 - DNA, 495 bp, Artificial Sequence; identical to SEQ ID NO: 1955
  source: /note="Description of Artificial Sequence: Synthetic polynucleotide"

SEQ ID NO: 4236 - DNA, 495 bp, Artificial Sequence; identical to SEQ ID NO: 1956
  source: /note="Description of Artificial Sequence: Synthetic polynucleotide"

SEQ ID NO: 4237 - DNA, 495 bp, Artificial Sequence; identical to SEQ ID NO: 1957
  source: /note="Description of Artificial Sequence: Synthetic polynucleotide"

SEQ ID NO: 4238 - DNA, 495 bp, Artificial Sequence; identical to SEQ ID NO: 1958
  source: /note="Description of Artificial Sequence: Synthetic polynucleotide"

SEQ ID NO: 4239 - DNA, 495 bp, Artificial Sequence; identical to SEQ ID NO: 1959
  source: /note="Description of Artificial Sequence: Synthetic polynucleotide"

SEQ ID NO: 4240 - DNA, 495 bp, Artificial Sequence; identical to SEQ ID NO: 1960
  source: /note="Description of Artificial Sequence: Synthetic polynucleotide"

SEQ ID NO: 4241 - DNA, 495 bp, Artificial Sequence; identical to SEQ ID NO: 1961
  source: /note="Description of Artificial Sequence: Synthetic polynucleotide"

SEQ ID NO: 4242 - DNA, 495 bp, Artificial Sequence; identical to SEQ ID NO: 1962
  source: /note="Description of Artificial Sequence: Synthetic polynucleotide"

SEQ ID NO: 4243 - DNA, 495 bp, Artificial Sequence; identical to SEQ ID NO: 1963
  source: /note="Description of Artificial Sequence: Synthetic polynucleotide"

SEQ ID NO: 4244 - DNA, 495 bp, Artificial Sequence; identical to SEQ ID NO: 1964
  source: /note="Description of Artificial Sequence: Synthetic polynucleotide"

SEQ ID NO: 4245 - DNA, 495 bp, Artificial Sequence; identical to SEQ ID NO: 1965
  source: /note="Description of Artificial Sequence: Synthetic polynucleotide"

SEQ ID NO: 4246 - DNA, 495 bp, Artificial Sequence; identical to SEQ ID NO: 1966
  source: /note="Description of Artificial Sequence: Synthetic polynucleotide"

SEQ ID NO: 4247 - DNA, 495 bp, Artificial Sequence; identical to SEQ ID NO: 1967
  source: /note="Description of Artificial Sequence: Synthetic polynucleotide"

SEQ ID NO: 4248 - DNA, 495 bp, Artificial Sequence; identical to SEQ ID NO: 1968
  source: /note="Description of Artificial Sequence: Synthetic polynucleotide"

SEQ ID NO: 4249 - DNA, 495 bp, Artificial Sequence; identical to SEQ ID NO: 1969
  source: /note="Description of Artificial Sequence: Synthetic polynucleotide"

SEQ ID NO: 4250 - DNA, 495 bp, Artificial Sequence; identical to SEQ ID NO: 1970
  source: /note="Description of Artificial Sequence: Synthetic polynucleotide"

SEQ ID NO: 4251 - DNA, 495 bp, Artificial Sequence; identical to SEQ ID NO: 1971
  source: /note="Description of Artificial Sequence: Synthetic polynucleotide"

SEQ ID NO: 4252 - DNA, 495 bp, Artificial Sequence; identical to SEQ ID NO: 1972
  source: /note="Description of Artificial Sequence: Synthetic polynucleotide"

SEQ ID NO: 4253 - DNA, 495 bp, Artificial Sequence; identical to SEQ ID NO: 1973
  source: /note="Description of Artificial Sequence: Synthetic polynucleotide"

SEQ ID NO: 4254 - DNA, 495 bp, Artificial Sequence; identical to SEQ ID NO: 1974
  source: /note="Description of Artificial Sequence: Synthetic polynucleotide"

SEQ ID NO: 4255 - DNA, 495 bp, Artificial Sequence; identical to SEQ ID NO: 1975
  source: /note="Description of Artificial Sequence: Synthetic polynucleotide"

SEQ ID NO: 4256 - DNA, 495 bp, Artificial Sequence; identical to SEQ ID NO: 1976
  source: /note="Description of Artificial Sequence: Synthetic polynucleotide"

SEQ ID NO: 4257 - DNA, 495 bp, Artificial Sequence; identical to SEQ ID NO: 1977
  source: /note="Description of Artificial Sequence: Synthetic polynucleotide"

SEQ ID NO: 4258 - DNA, 495 bp, Artificial Sequence; identical to SEQ ID NO: 1978
  source: /note="Description of Artificial Sequence: Synthetic polynucleotide"

SEQ ID NO: 4259 - DNA, 495 bp, Artificial Sequence; identical to SEQ ID NO: 1979
  source: /note="Description of Artificial Sequence: Synthetic polynucleotide"

SEQ ID NO: 4260 - DNA, 495 bp, Artificial Sequence; identical to SEQ ID NO: 1980
  source: /note="Description of Artificial Sequence: Synthetic polynucleotide"

SEQ ID NO: 4261 - DNA, 495 bp, Artificial Sequence; identical to SEQ ID NO: 1981
  source: /note="Description of Artificial Sequence: Synthetic polynucleotide"

SEQ ID NO: 4262 - DNA, 495 bp, Artificial Sequence; identical to SEQ ID NO: 1982
  source: /note="Description of Artificial Sequence: Synthetic polynucleotide"

SEQ ID NO: 4263 - DNA, 495 bp, Artificial Sequence; identical to SEQ ID NO: 1983
  source: /note="Description of Artificial Sequence: Synthetic polynucleotide"

SEQ ID NO: 4264 - DNA, 495 bp, Artificial Sequence; identical to SEQ ID NO: 1984
  source: /note="Description of Artificial Sequence: Synthetic polynucleotide"

SEQ ID NO: 4265 - DNA, 495 bp, Artificial Sequence; identical to SEQ ID NO: 1985
  source: /note="Description of Artificial Sequence: Synthetic polynucleotide"

SEQ ID NO: 4266 - DNA, 495 bp, Artificial Sequence; identical to SEQ ID NO: 1986
  source: /note="Description of Artificial Sequence: Synthetic polynucleotide"

SEQ ID NO: 4267 - DNA, 495 bp, Artificial Sequence; identical to SEQ ID NO: 1987
  source: /note="Description of Artificial Sequence: Synthetic polynucleotide"

SEQ ID NO: 4268 - DNA, 495 bp, Artificial Sequence; identical to SEQ ID NO: 1988
  source: /note="Description of Artificial Sequence: Synthetic polynucleotide"

SEQ ID NO: 4269 - DNA, 495 bp, Artificial Sequence; identical to SEQ ID NO: 1989
  source: /note="Description of Artificial Sequence: Synthetic polynucleotide"

SEQ ID NO: 4270 - DNA, 495 bp, Artificial Sequence; identical to SEQ ID NO: 1990
  source: /note="Description of Artificial Sequence: Synthetic polynucleotide"

SEQ ID NO: 4271 - DNA, 495 bp, Artificial Sequence; identical to SEQ ID NO: 1991
  source: /note="Description of Artificial Sequence: Synthetic polynucleotide"

SEQ ID NO: 4272 - DNA, 495 bp, Artificial Sequence; identical to SEQ ID NO: 1992
  source: /note="Description of Artificial Sequence: Synthetic polynucleotide"

SEQ ID NO: 4273 - DNA, 495 bp, Artificial Sequence; identical to SEQ ID NO: 1993
  source: /note="Description of Artificial Sequence: Synthetic polynucleotide"

SEQ ID NO: 4274 - DNA, 495 bp, Artificial Sequence; identical to SEQ ID NO: 1994
  source: /note="Description of Artificial Sequence: Synthetic polynucleotide"

SEQ ID NO: 4275 - DNA, 495 bp, Artificial Sequence; identical to SEQ ID NO: 1995
  source: /note="Description of Artificial Sequence: Synthetic polynucleotide"

SEQ ID NO: 4276 - DNA, 495 bp, Artificial Sequence; identical to SEQ ID NO: 1996
  source: /note="Description of Artificial Sequence: Synthetic polynucleotide"

SEQ ID NO: 4277 - DNA, 495 bp, Artificial Sequence; identical to SEQ ID NO: 1997
  source: /note="Description of Artificial Sequence: Synthetic polynucleotide"

SEQ ID NO: 4278 - DNA, 495 bp, Artificial Sequence; identical to SEQ ID NO: 1998
  source: /note="Description of Artificial Sequence: Synthetic polynucleotide"

SEQ ID NO: 4279 - DNA, 495 bp, Artificial Sequence; identical to SEQ ID NO: 1999
  source: /note="Description of Artificial Sequence: Synthetic polynucleotide"

SEQ ID NO: 4280 - DNA, 495 bp, Artificial Sequence; identical to SEQ ID NO: 2000
  source: /note="Description of Artificial Sequence: Synthetic polynucleotide"

SEQ ID NO: 4281 - DNA, 495 bp, Artificial Sequence; identical to SEQ ID NO: 2001
  source: /note="Description of Artificial Sequence: Synthetic polynucleotide"

SEQ ID NO: 4282 - DNA, 495 bp, Artificial Sequence; identical to SEQ ID NO: 2002
  source: /note="Description of Artificial Sequence: Synthetic polynucleotide"

SEQ ID NO: 4283 - DNA, 495 bp, Artificial Sequence; identical to SEQ ID NO: 2003
  source: /note="Description of Artificial Sequence: Synthetic polynucleotide"

SEQ ID NO: 4284 - DNA, 495 bp, Artificial Sequence; identical to SEQ ID NO: 2004
  source: /note="Description of Artificial Sequence: Synthetic polynucleotide"

SEQ ID NO: 4285 - DNA, 495 bp, Artificial Sequence; identical to SEQ ID NO: 2005
  source: /note="Description of Artificial Sequence: Synthetic polynucleotide"

SEQ ID NO: 4286 - DNA, 495 bp, Artificial Sequence; identical to SEQ ID NO: 2006
  source: /note="Description of Artificial Sequence: Synthetic polynucleotide"

SEQ ID NO: 4287 - DNA, 495 bp, Artificial Sequence; identical to SEQ ID NO: 2007
  source: /note="Description of Artificial Sequence: Synthetic polynucleotide"

SEQ ID NO: 4288 - DNA, 495 bp, Artificial Sequence; identical to SEQ ID NO: 2008
  source: /note="Description of Artificial Sequence: Synthetic polynucleotide"

SEQ ID NO: 4289 - DNA, 495 bp, Artificial Sequence; identical to SEQ ID NO: 2009
  source: /note="Description of Artificial Sequence: Synthetic polynucleotide"

SEQ ID NO: 4290 - DNA, 495 bp, Artificial Sequence; identical to SEQ ID NO: 2010
  source: /note="Description of Artificial Sequence: Synthetic polynucleotide"

SEQ ID NO: 4291 - DNA, 495 bp, Artificial Sequence; identical to SEQ ID NO: 2011
  source: /note="Description of Artificial Sequence: Synthetic polynucleotide"

SEQ ID NO: 4292 - DNA, 495 bp, Artificial Sequence; identical to SEQ ID NO: 2012
  source: /note="Description of Artificial Sequence: Synthetic polynucleotide"

SEQ ID NO: 4293 - DNA, 495 bp, Artificial Sequence; identical to SEQ ID NO: 2013
  source: /note="Description of Artificial Sequence: Synthetic polynucleotide"

SEQ ID NO: 4294 - DNA, 495 bp, Artificial Sequence; identical to SEQ ID NO: 2014
  source: /note="Description of Artificial Sequence: Synthetic polynucleotide"

SEQ ID NO: 4295 - DNA, 495 bp, Artificial Sequence; identical to SEQ ID NO: 2015
  source: /note="Description of Artificial Sequence: Synthetic polynucleotide"

SEQ ID NO: 4296 - DNA, 495 bp, Artificial Sequence; identical to SEQ ID NO: 2016
  source: /note="Description of Artificial Sequence: Synthetic polynucleotide"

SEQ ID NO: 4297 - DNA, 495 bp, Artificial Sequence; identical to SEQ ID NO: 2017
  source: /note="Description of Artificial Sequence: Synthetic polynucleotide"

SEQ ID NO: 4298 - DNA, 495 bp, Artificial Sequence; identical to SEQ ID NO: 2018
  source: /note="Description of Artificial Sequence: Synthetic polynucleotide"

SEQ ID NO: 4299 - DNA, 495 bp, Artificial Sequence; identical to SEQ ID NO: 2019
  source: /note="Description of Artificial Sequence: Synthetic polynucleotide"

SEQ ID NO: 4300 - DNA, 495 bp, Artificial Sequence; identical to SEQ ID NO: 2020
  source: /note="Description of Artificial Sequence: Synthetic polynucleotide"

SEQ ID NO: 4301 - DNA, 495 bp, Artificial Sequence; identical to SEQ ID NO: 2021
  source: /note="Description of Artificial Sequence: Synthetic polynucleotide"

SEQ ID NO: 4302 - DNA, 495 bp, Artificial Sequence; identical to SEQ ID NO: 2022
  source: /note="Description of Artificial Sequence: Synthetic polynucleotide"

SEQ ID NO: 4303 - DNA, 495 bp, Artificial Sequence; identical to SEQ ID NO: 2023
  source: /note="Description of Artificial Sequence: Synthetic polynucleotide"

SEQ ID NO: 4304 - DNA, 495 bp, Artificial Sequence; identical to SEQ ID NO: 2024
  source: /note="Description of Artificial Sequence: Synthetic polynucleotide"

SEQ ID NO: 4305 - DNA, 495 bp, Artificial Sequence; identical to SEQ ID NO: 2025
  source: /note="Description of Artificial Sequence: Synthetic polynucleotide"

SEQ ID NO: 4306 - DNA, 495 bp, Artificial Sequence; identical to SEQ ID NO: 2026
  source: /note="Description of Artificial Sequence: Synthetic polynucleotide"

SEQ ID NO: 4307 - DNA, 495 bp, Artificial Sequence; identical to SEQ ID NO: 2027
  source: /note="Description of Artificial Sequence: Synthetic polynucleotide"

SEQ ID NO: 4308 - DNA, 495 bp, Artificial Sequence; identical to SEQ ID NO: 2028
  source: /note="Description of Artificial Sequence: Synthetic polynucleotide"

SEQ ID NO: 4309 - DNA, 495 bp, Artificial Sequence; identical to SEQ ID NO: 2029
  source: /note="Description of Artificial Sequence: Synthetic polynucleotide"

SEQ ID NO: 4310 - DNA, 495 bp, Artificial Sequence; identical to SEQ ID NO: 2030
  source: /note="Description of Artificial Sequence: Synthetic polynucleotide"

SEQ ID NO: 4311 - DNA, 495 bp, Artificial Sequence; identical to SEQ ID NO: 2031
  source: /note="Description of Artificial Sequence: Synthetic polynucleotide"

SEQ ID NO: 4312 - DNA, 495 bp, Artificial Sequence; identical to SEQ ID NO: 2032
  source: /note="Description of Artificial Sequence: Synthetic polynucleotide"

SEQ ID NO: 4313 - DNA, 495 bp, Artificial Sequence; identical to SEQ ID NO: 2033
  source: /note="Description of Artificial Sequence: Synthetic polynucleotide"

SEQ ID NO: 4314 - DNA, 495 bp, Artificial Sequence; identical to SEQ ID NO: 2034
  source: /note="Description of Artificial Sequence: Synthetic polynucleotide"

SEQ ID NO: 4315 - DNA, 495 bp, Artificial Sequence; identical to SEQ ID NO: 2035
  source: /note="Description of Artificial Sequence: Synthetic polynucleotide"

SEQ ID NO: 4316 - DNA, 495 bp, Artificial Sequence; identical to SEQ ID NO: 2036
  source: /note="Description of Artificial Sequence: Synthetic polynucleotide"

SEQ ID NO: 4317 - DNA, 495 bp, Artificial Sequence; identical to SEQ ID NO: 2037
  source: /note="Description of Artificial Sequence: Synthetic polynucleotide"

SEQ ID NO: 4318 - DNA, 495 bp, Artificial Sequence; identical to SEQ ID NO: 2038
  source: /note="Description of Artificial Sequence: Synthetic polynucleotide"

SEQ ID NO: 4319 - DNA, 495 bp, Artificial Sequence; identical to SEQ ID NO: 2039
  source: /note="Description of Artificial Sequence: Synthetic polynucleotide"

SEQ ID NO: 4320 - DNA, 495 bp, Artificial Sequence; identical to SEQ ID NO: 2040
  source: /note="Description of Artificial Sequence: Synthetic polynucleotide"

SEQ ID NO: 4321 - DNA, 495 bp, Artificial Sequence; identical to SEQ ID NO: 2041
  source: /note="Description of Artificial Sequence: Synthetic polynucleotide"

SEQ ID NO: 4322 - DNA, 495 bp, Artificial Sequence; identical to SEQ ID NO: 2042
  source: /note="Description of Artificial Sequence: Synthetic polynucleotide"

SEQ ID NO: 4323 - DNA, 495 bp, Artificial Sequence; identical to SEQ ID NO: 2043
  source: /note="Description of Artificial Sequence: Synthetic polynucleotide"

SEQ ID NO: 4324 - DNA, 495 bp, Artificial Sequence; identical to SEQ ID NO: 2044
  source: /note="Description of Artificial Sequence: Synthetic polynucleotide"

SEQ ID NO: 4325 - DNA, 495 bp, Artificial Sequence; identical to SEQ ID NO: 2045
  source: /note="Description of Artificial Sequence: Synthetic polynucleotide"

SEQ ID NO: 4326 - DNA, 495 bp, Artificial Sequence; identical to SEQ ID NO: 2046
  source: /note="Description of Artificial Sequence: Synthetic polynucleotide"

SEQ ID NO: 4327 - DNA, 495 bp, Artificial Sequence; identical to SEQ ID NO: 2047
  source: /note="Description of Artificial Sequence: Synthetic polynucleotide"

SEQ ID NO: 4328 - DNA, 495 bp, Artificial Sequence; identical to SEQ ID NO: 2048
  source: /note="Description of Artificial Sequence: Synthetic polynucleotide"

SEQ ID NO: 4329 - DNA, 495 bp, Artificial Sequence; identical to SEQ ID NO: 2049
  source: /note="Description of Artificial Sequence: Synthetic polynucleotide"

SEQ ID NO: 4330 - DNA, 495 bp, Artificial Sequence; identical to SEQ ID NO: 2050
  source: /note="Description of Artificial Sequence: Synthetic polynucleotide"

SEQ ID NO: 4331 - DNA, 448 bp, Artificial Sequence; identical to SEQ ID NO: 2051
  source: /note="Description of Artificial Sequence: Synthetic polynucleotide"

SEQ ID NO: 4332 - DNA, 495 bp, Artificial Sequence; identical to SEQ ID NO: 2052
  source: /note="Description of Artificial Sequence: Synthetic polynucleotide"

SEQ ID NO: 4333 - DNA, 495 bp, Artificial Sequence; identical to SEQ ID NO: 2053
  source: /note="Description of Artificial Sequence: Synthetic polynucleotide"

SEQ ID NO: 4334 - DNA, 495 bp, Artificial Sequence; identical to SEQ ID NO: 2054
  source: /note="Description of Artificial Sequence: Synthetic polynucleotide"

SEQ ID NO: 4335 - DNA, 495 bp, Artificial Sequence; identical to SEQ ID NO: 2055
  source: /note="Description of Artificial Sequence: Synthetic polynucleotide"

SEQ ID NO: 4336 - DNA, 495 bp, Artificial Sequence; identical to SEQ ID NO: 2056
  source: /note="Description of Artificial Sequence: Synthetic polynucleotide"

SEQ ID NO: 4337 - DNA, 495 bp, Artificial Sequence; identical to SEQ ID NO: 2057
  source: /note="Description of Artificial Sequence: Synthetic polynucleotide"

SEQ ID NO: 4338 - DNA, 495 bp, Artificial Sequence; identical to SEQ ID NO: 2058
  source: /note="Description of Artificial Sequence: Synthetic polynucleotide"

SEQ ID NO: 4339 - DNA, 495 bp, Artificial Sequence; identical to SEQ ID NO: 2059
  source: /note="Description of Artificial Sequence: Synthetic polynucleotide"

SEQ ID NO: 4340 - DNA, 495 bp, Artificial Sequence; identical to SEQ ID NO: 2060
  source: /note="Description of Artificial Sequence: Synthetic polynucleotide"

SEQ ID NO: 4341 - DNA, 495 bp, Artificial Sequence; identical to SEQ ID NO: 2061
  source: /note="Description of Artificial Sequence: Synthetic polynucleotide"

SEQ ID NO: 4342 - DNA, 495 bp, Artificial Sequence; identical to SEQ ID NO: 2062
  source: /note="Description of Artificial Sequence: Synthetic polynucleotide"

SEQ ID NO: 4343 - DNA, 495 bp, Artificial Sequence; identical to SEQ ID NO: 2063
  source: /note="Description of Artificial Sequence: Synthetic polynucleotide"

SEQ ID NO: 4344 - DNA, 495 bp, Artificial Sequence; identical to SEQ ID NO: 2064
  source: /note="Description of Artificial Sequence: Synthetic polynucleotide"

SEQ ID NO: 4345 - DNA, 495 bp, Artificial Sequence; identical to SEQ ID NO: 2065
  source: /note="Description of Artificial Sequence: Synthetic polynucleotide"

SEQ ID NO: 4346 - DNA, 495 bp, Artificial Sequence; identical to SEQ ID NO: 2066
  source: /note="Description of Artificial Sequence: Synthetic polynucleotide"

SEQ ID NO: 4347 - DNA, 495 bp, Artificial Sequence; identical to SEQ ID NO: 2067
  source: /note="Description of Artificial Sequence: Synthetic polynucleotide"

SEQ ID NO: 4348 - DNA, 495 bp, Artificial Sequence; identical to SEQ ID NO: 2068
  source: /note="Description of Artificial Sequence: Synthetic polynucleotide"

SEQ ID NO: 4349 - DNA, 495 bp, Artificial Sequence; identical to SEQ ID NO: 2069
  source: /note="Description of Artificial Sequence: Synthetic polynucleotide"

SEQ ID NO: 4350 - DNA, 495 bp, Artificial Sequence; identical to SEQ ID NO: 2070
  source: /note="Description of Artificial Sequence: Synthetic polynucleotide"

SEQ ID NO: 4351 - DNA, 495 bp, Artificial Sequence; identical to SEQ ID NO: 2071
  source: /note="Description of Artificial Sequence: Synthetic polynucleotide"

SEQ ID NO: 4352 - DNA, 495 bp, Artificial Sequence; identical to SEQ ID NO: 2072
  source: /note="Description of Artificial Sequence: Synthetic polynucleotide"

SEQ ID NO: 4353 - DNA, 495 bp, Artificial Sequence; identical to SEQ ID NO: 2073
  source: /note="Description of Artificial Sequence: Synthetic polynucleotide"

SEQ ID NO: 4354 - DNA, 495 bp, Artificial Sequence; identical to SEQ ID NO: 2074
  source: /note="Description of Artificial Sequence: Synthetic polynucleotide"

SEQ ID NO: 4355 - DNA, 495 bp, Artificial Sequence; identical to SEQ ID NO: 2075
  source: /note="Description of Artificial Sequence: Synthetic polynucleotide"

SEQ ID NO: 4356 - DNA, 495 bp, Artificial Sequence; identical to SEQ ID NO: 2076
  source: /note="Description of Artificial Sequence: Synthetic polynucleotide"

SEQ ID NO: 4357 - DNA, 495 bp, Artificial Sequence; identical to SEQ ID NO: 2077
  source: /note="Description of Artificial Sequence: Synthetic polynucleotide"

SEQ ID NO: 4358 - DNA, 495 bp, Artificial Sequence; identical to SEQ ID NO: 2078
  source: /note="Description of Artificial Sequence: Synthetic polynucleotide"

SEQ ID NO: 4359 - DNA, 495 bp, Artificial Sequence; identical to SEQ ID NO: 2079
  source: /note="Description of Artificial Sequence: Synthetic polynucleotide"

SEQ ID NO: 4360 - DNA, 495 bp, Artificial Sequence; identical to SEQ ID NO: 2080
  source: /note="Description of Artificial Sequence: Synthetic polynucleotide"

SEQ ID NO: 4361 - DNA, 495 bp, Artificial Sequence; identical to SEQ ID NO: 2081
  source: /note="Description of Artificial Sequence: Synthetic polynucleotide"

SEQ ID NO: 4362 - DNA, 495 bp, Artificial Sequence; identical to SEQ ID NO: 2082
  source: /note="Description of Artificial Sequence: Synthetic polynucleotide"

SEQ ID NO: 4363 - DNA, 495 bp, Artificial Sequence; identical to SEQ ID NO: 2083
  source: /note="Description of Artificial Sequence: Synthetic polynucleotide"

SEQ ID NO: 4364 - DNA, 495 bp, Artificial Sequence; identical to SEQ ID NO: 2084
  source: /note="Description of Artificial Sequence: Synthetic polynucleotide"

SEQ ID NO: 4365 - DNA, 495 bp, Artificial Sequence; identical to SEQ ID NO: 2085
  source: /note="Description of Artificial Sequence: Synthetic polynucleotide"

SEQ ID NO: 4366 - DNA, 495 bp, Artificial Sequence; identical to SEQ ID NO: 2086
  source: /note="Description of Artificial Sequence: Synthetic polynucleotide"

SEQ ID NO: 4367 - DNA, 495 bp, Artificial Sequence; identical to SEQ ID NO: 2087
  source: /note="Description of Artificial Sequence: Synthetic polynucleotide"

SEQ ID NO: 4368 - DNA, 495 bp, Artificial Sequence; identical to SEQ ID NO: 2088
  source: /note="Description of Artificial Sequence: Synthetic polynucleotide"

SEQ ID NO: 4369 - DNA, 495 bp, Artificial Sequence; identical to SEQ ID NO: 2089
  source: /note="Description of Artificial Sequence: Synthetic polynucleotide"

SEQ ID NO: 4370 - DNA, 495 bp, Artificial Sequence; identical to SEQ ID NO: 2090
  source: /note="Description of Artificial Sequence: Synthetic polynucleotide"

SEQ ID NO: 4371 - DNA, 495 bp, Artificial Sequence; identical to SEQ ID NO: 2091
  source: /note="Description of Artificial Sequence: Synthetic polynucleotide"

SEQ ID NO: 4372 - DNA, 495 bp, Artificial Sequence; identical to SEQ ID NO: 2092
  source: /note="Description of Artificial Sequence: Synthetic polynucleotide"

SEQ ID NO: 4373 - DNA, 495 bp, Artificial Sequence; identical to SEQ ID NO: 2093
  source: /note="Description of Artificial Sequence: Synthetic polynucleotide"

SEQ ID NO: 4374 - DNA, 495 bp, Artificial Sequence; identical to SEQ ID NO: 2094
  source: /note="Description of Artificial Sequence: Synthetic polynucleotide"

SEQ ID NO: 4375 - DNA, 495 bp, Artificial Sequence; identical to SEQ ID NO: 2095
  source: /note="Description of Artificial Sequence: Synthetic polynucleotide"

SEQ ID NO: 4376 - DNA, 495 bp, Artificial Sequence; identical to SEQ ID NO: 2096
  source: /note="Description of Artificial Sequence: Synthetic polynucleotide"

SEQ ID NO: 4377 - DNA, 495 bp, Artificial Sequence; identical to SEQ ID NO: 2097
  source: /note="Description of Artificial Sequence: Synthetic polynucleotide"

SEQ ID NO: 4378 - DNA, 495 bp, Artificial Sequence; identical to SEQ ID NO: 2098
  source: /note="Description of Artificial Sequence: Synthetic polynucleotide"

SEQ ID NO: 4379 - DNA, 495 bp, Artificial Sequence; identical to SEQ ID NO: 2099
  source: /note="Description of Artificial Sequence: Synthetic polynucleotide"

SEQ ID NO: 4380 - DNA, 495 bp, Artificial Sequence; identical to SEQ ID NO: 2100
  source: /note="Description of Artificial Sequence: Synthetic polynucleotide"

SEQ ID NO: 4381 - DNA, 495 bp, Artificial Sequence; identical to SEQ ID NO: 2101
  source: /note="Description of Artificial Sequence: Synthetic polynucleotide"

SEQ ID NO: 4382 - DNA, 495 bp, Artificial Sequence; identical to SEQ ID NO: 2102
  source: /note="Description of Artificial Sequence: Synthetic polynucleotide"

SEQ ID NO: 4383 - DNA, 495 bp, Artificial Sequence; identical to SEQ ID NO: 2103
  source: /note="Description of Artificial Sequence: Synthetic polynucleotide"

SEQ ID NO: 4384 - DNA, 495 bp, Artificial Sequence; identical to SEQ ID NO: 2104
  source: /note="Description of Artificial Sequence: Synthetic polynucleotide"

SEQ ID NO: 4385 - DNA, 495 bp, Artificial Sequence; identical to SEQ ID NO: 2105
  source: /note="Description of Artificial Sequence: Synthetic polynucleotide"

SEQ ID NO: 4386 - DNA, 495 bp, Artificial Sequence; identical to SEQ ID NO: 2106
  source: /note="Description of Artificial Sequence: Synthetic polynucleotide"

SEQ ID NO: 4387 - DNA, 495 bp, Artificial Sequence; identical to SEQ ID NO: 2107
  source: /note="Description of Artificial Sequence: Synthetic polynucleotide"

SEQ ID NO: 4388 - DNA, 495 bp, Artificial Sequence; identical to SEQ ID NO: 2108
  source: /note="Description of Artificial Sequence: Synthetic polynucleotide"

SEQ ID NO: 4389 - DNA, 495 bp, Artificial Sequence; identical to SEQ ID NO: 2109
  source: /note="Description of Artificial Sequence: Synthetic polynucleotide"

SEQ ID NO: 4390 - DNA, 495 bp, Artificial Sequence; identical to SEQ ID NO: 2110
  source: /note="Description of Artificial Sequence: Synthetic polynucleotide"

SEQ ID NO: 4391 - DNA, 495 bp, Artificial Sequence; identical to SEQ ID NO: 2111
  source: /note="Description of Artificial Sequence: Synthetic polynucleotide"

SEQ ID NO: 4392 - DNA, 495 bp, Artificial Sequence; identical to SEQ ID NO: 2112
  source: /note="Description of Artificial Sequence: Synthetic polynucleotide"

SEQ ID NO: 4393 - DNA, 495 bp, Artificial Sequence; identical to SEQ ID NO: 2113
  source: /note="Description of Artificial Sequence: Synthetic polynucleotide"

SEQ ID NO: 4394 - DNA, 495 bp, Artificial Sequence; identical to SEQ ID NO: 2114
  source: /note="Description of Artificial Sequence: Synthetic polynucleotide"

SEQ ID NO: 4395 - DNA, 495 bp, Artificial Sequence; identical to SEQ ID NO: 2115
  source: /note="Description of Artificial Sequence: Synthetic polynucleotide"

SEQ ID NO: 4396 - DNA, 495 bp, Artificial Sequence; identical to SEQ ID NO: 2116
  source: /note="Description of Artificial Sequence: Synthetic polynucleotide"

SEQ ID NO: 4397 - DNA, 495 bp, Artificial Sequence; identical to SEQ ID NO: 2117
  source: /note="Description of Artificial Sequence: Synthetic polynucleotide"

SEQ ID NO: 4398 - DNA, 495 bp, Artificial Sequence; identical to SEQ ID NO: 2118
  source: /note="Description of Artificial Sequence: Synthetic polynucleotide"

SEQ ID NO: 4399 - DNA, 495 bp, Artificial Sequence; identical to SEQ ID NO: 2119
  source: /note="Description of Artificial Sequence: Synthetic polynucleotide"

SEQ ID NO: 4400 - DNA, 495 bp, Artificial Sequence; identical to SEQ ID NO: 2120
  source: /note="Description of Artificial Sequence: Synthetic polynucleotide"

SEQ ID NO: 4401 - DNA, 495 bp, Artificial Sequence; identical to SEQ ID NO: 2121
  source: /note="Description of Artificial Sequence: Synthetic polynucleotide"

SEQ ID NO: 4402 - DNA, 495 bp, Artificial Sequence; identical to SEQ ID NO: 2122
  source: /note="Description of Artificial Sequence: Synthetic polynucleotide"

SEQ ID NO: 4403 - DNA, 495 bp, Artificial Sequence; identical to SEQ ID NO: 2123
  source: /note="Description of Artificial Sequence: Synthetic polynucleotide"

SEQ ID NO: 4404 - DNA, 495 bp, Artificial Sequence; identical to SEQ ID NO: 2124
  source: /note="Description of Artificial Sequence: Synthetic polynucleotide"

SEQ ID NO: 4405 - DNA, 495 bp, Artificial Sequence; identical to SEQ ID NO: 2125
  source: /note="Description of Artificial Sequence: Synthetic polynucleotide"

SEQ ID NO: 4406 - DNA, 495 bp, Artificial Sequence; identical to SEQ ID NO: 2126
  source: /note="Description of Artificial Sequence: Synthetic polynucleotide"

SEQ ID NO: 4407 - DNA, 495 bp, Artificial Sequence; identical to SEQ ID NO: 2127
  source: /note="Description of Artificial Sequence: Synthetic polynucleotide"

SEQ ID NO: 4408 - DNA, 495 bp, Artificial Sequence; identical to SEQ ID NO: 2128
  source: /note="Description of Artificial Sequence: Synthetic polynucleotide"

SEQ ID NO: 4409 - DNA, 495 bp, Artificial Sequence; identical to SEQ ID NO: 2129
  source: /note="Description of Artificial Sequence: Synthetic polynucleotide"

SEQ ID NO: 4410 - DNA, 495 bp, Artificial Sequence; identical to SEQ ID NO: 2130
  source: /note="Description of Artificial Sequence: Synthetic polynucleotide"

SEQ ID NO: 4411 - DNA, 495 bp, Artificial Sequence; identical to SEQ ID NO: 2131
  source: /note="Description of Artificial Sequence: Synthetic polynucleotide"

SEQ ID NO: 4412 - DNA, 495 bp, Artificial Sequence; identical to SEQ ID NO: 2132
  source: /note="Description of Artificial Sequence: Synthetic polynucleotide"

SEQ ID NO: 4413 - DNA, 495 bp, Artificial Sequence; identical to SEQ ID NO: 2133
  source: /note="Description of Artificial Sequence: Synthetic polynucleotide"

SEQ ID NO: 4414 - DNA, 495 bp, Artificial Sequence; identical to SEQ ID NO: 2134
  source: /note="Description of Artificial Sequence: Synthetic polynucleotide"

SEQ ID NO: 4415 - DNA, 495 bp, Artificial Sequence; identical to SEQ ID NO: 2135
  source: /note="Description of Artificial Sequence: Synthetic polynucleotide"

SEQ ID NO: 4416 - DNA, 495 bp, Artificial Sequence; identical to SEQ ID NO: 2136
  source: /note="Description of Artificial Sequence: Synthetic polynucleotide"

SEQ ID NO: 4417 - DNA, 495 bp, Artificial Sequence; identical to SEQ ID NO: 2137
  source: /note="Description of Artificial Sequence: Synthetic polynucleotide"

SEQ ID NO: 4418 - DNA, 495 bp, Artificial Sequence; identical to SEQ ID NO: 2138
  source: /note="Description of Artificial Sequence: Synthetic polynucleotide"

SEQ ID NO: 4419 - DNA, 495 bp, Artificial Sequence; identical to SEQ ID NO: 2139
  source: /note="Description of Artificial Sequence: Synthetic polynucleotide"

SEQ ID NO: 4420 - DNA, 495 bp, Artificial Sequence; identical to SEQ ID NO: 2140
  source: /note="Description of Artificial Sequence: Synthetic polynucleotide"

SEQ ID NO: 4421 - DNA, 495 bp, Artificial Sequence; identical to SEQ ID NO: 2141
  source: /note="Description of Artificial Sequence: Synthetic polynucleotide"

SEQ ID NO: 4422 - DNA, 495 bp, Artificial Sequence; identical to SEQ ID NO: 2142
  source: /note="Description of Artificial Sequence: Synthetic polynucleotide"

SEQ ID NO: 4423 - DNA, 495 bp, Artificial Sequence; identical to SEQ ID NO: 2143
  source: /note="Description of Artificial Sequence: Synthetic polynucleotide"

SEQ ID NO: 4424 - DNA, 495 bp, Artificial Sequence; identical to SEQ ID NO: 2144
  source: /note="Description of Artificial Sequence: Synthetic polynucleotide"

SEQ ID NO: 4425 - DNA, 495 bp, Artificial Sequence; identical to SEQ ID NO: 2145
  source: /note="Description of Artificial Sequence: Synthetic polynucleotide"

SEQ ID NO: 4426 - DNA, 495 bp, Artificial Sequence; identical to SEQ ID NO: 2146
  source: /note="Description of Artificial Sequence: Synthetic polynucleotide"

SEQ ID NO: 4427 - DNA, 495 bp, Artificial Sequence; identical to SEQ ID NO: 2147
  source: /note="Description of Artificial Sequence: Synthetic polynucleotide"

SEQ ID NO: 4428 - DNA, 495 bp, Artificial Sequence; identical to SEQ ID NO: 2148
  source: /note="Description of Artificial Sequence: Synthetic polynucleotide"

SEQ ID NO: 4429 - DNA, 495 bp, Artificial Sequence; identical to SEQ ID NO: 2149
  source: /note="Description of Artificial Sequence: Synthetic polynucleotide"

SEQ ID NO: 4430 - DNA, 495 bp, Artificial Sequence; identical to SEQ ID NO: 2150
  source: /note="Description of Artificial Sequence: Synthetic polynucleotide"

SEQ ID NO: 4431 - DNA, 495 bp, Artificial Sequence; identical to SEQ ID NO: 2151
  source: /note="Description of Artificial Sequence: Synthetic polynucleotide"

SEQ ID NO: 4432 - DNA, 495 bp, Artificial Sequence; identical to SEQ ID NO: 2152
  source: /note="Description of Artificial Sequence: Synthetic polynucleotide"

SEQ ID NO: 4433 - DNA, 495 bp, Artificial Sequence; identical to SEQ ID NO: 2153
  source: /note="Description of Artificial Sequence: Synthetic polynucleotide"

SEQ ID NO: 4434 - DNA, 495 bp, Artificial Sequence; identical to SEQ ID NO: 2154
  source: /note="Description of Artificial Sequence: Synthetic polynucleotide"

SEQ ID NO: 4435 - DNA, 495 bp, Artificial Sequence; identical to SEQ ID NO: 2155
  source: /note="Description of Artificial Sequence: Synthetic polynucleotide"

SEQ ID NO: 4436 - DNA, 495 bp, Artificial Sequence; identical to SEQ ID NO: 2156
  source: /note="Description of Artificial Sequence: Synthetic polynucleotide"

SEQ ID NO: 4437 - DNA, 495 bp, Artificial Sequence; identical to SEQ ID NO: 2157
  source: /note="Description of Artificial Sequence: Synthetic polynucleotide"

SEQ ID NO: 4438 - DNA, 495 bp, Artificial Sequence; identical to SEQ ID NO: 2158
  source: /note="Description of Artificial Sequence: Synthetic polynucleotide"

SEQ ID NO: 4439 - DNA, 495 bp, Artificial Sequence; identical to SEQ ID NO: 2159
  source: /note="Description of Artificial Sequence: Synthetic polynucleotide"

SEQ ID NO: 4440 - DNA, 495 bp, Artificial Sequence; identical to SEQ ID NO: 2160
  source: /note="Description of Artificial Sequence: Synthetic polynucleotide"

SEQ ID NO: 4441 - DNA, 495 bp, Artificial Sequence; identical to SEQ ID NO: 2161
  source: /note="Description of Artificial Sequence: Synthetic polynucleotide"

SEQ ID NO: 4442 - DNA, 495 bp, Artificial Sequence; identical to SEQ ID NO: 2162
  source: /note="Description of Artificial Sequence: Synthetic polynucleotide"

SEQ ID NO: 4443 - DNA, 495 bp, Artificial Sequence; identical to SEQ ID NO: 2163
  source: /note="Description of Artificial Sequence: Synthetic polynucleotide"

SEQ ID NO: 4444 - DNA, 495 bp, Artificial Sequence; identical to SEQ ID NO: 2164
  source: /note="Description of Artificial Sequence: Synthetic polynucleotide"

SEQ ID NO: 4445 - DNA, 495 bp, Artificial Sequence; identical to SEQ ID NO: 2165
  source: /note="Description of Artificial Sequence: Synthetic polynucleotide"

SEQ ID NO: 4446 - DNA, 495 bp, Artificial Sequence; identical to SEQ ID NO: 2166
  source: /note="Description of Artificial Sequence: Synthetic polynucleotide"

SEQ ID NO: 4447 - DNA, 495 bp, Artificial Sequence; identical to SEQ ID NO: 2167
  source: /note="Description of Artificial Sequence: Synthetic polynucleotide"

SEQ ID NO: 4448 - DNA, 495 bp, Artificial Sequence; identical to SEQ ID NO: 2168
  source: /note="Description of Artificial Sequence: Synthetic polynucleotide"

SEQ ID NO: 4449 - DNA, 495 bp, Artificial Sequence; identical to SEQ ID NO: 2169
  source: /note="Description of Artificial Sequence: Synthetic polynucleotide"

SEQ ID NO: 4450 - DNA, 495 bp, Artificial Sequence; identical to SEQ ID NO: 2170
  source: /note="Description of Artificial Sequence: Synthetic polynucleotide"

SEQ ID NO: 4451 - DNA, 495 bp, Artificial Sequence; identical to SEQ ID NO: 2171
  source: /note="Description of Artificial Sequence: Synthetic polynucleotide"

SEQ ID NO: 4452 - DNA, 495 bp, Artificial Sequence; identical to SEQ ID NO: 2172
  source: /note="Description of Artificial Sequence: Synthetic polynucleotide"

SEQ ID NO: 4453 - DNA, 495 bp, Artificial Sequence; identical to SEQ ID NO: 2173
  source: /note="Description of Artificial Sequence: Synthetic polynucleotide"

SEQ ID NO: 4454 - DNA, 495 bp, Artificial Sequence; identical to SEQ ID NO: 2174
  source: /note="Description of Artificial Sequence: Synthetic polynucleotide"

SEQ ID NO: 4455 - DNA, 448 bp, Artificial Sequence; identical to SEQ ID NO: 2175
  source: /note="Description of Artificial Sequence: Synthetic polynucleotide"

SEQ ID NO: 4456 - DNA, 495 bp, Artificial Sequence; identical to SEQ ID NO: 2176
  source: /note="Description of Artificial Sequence: Synthetic polynucleotide"

SEQ ID NO: 4457 - DNA, 495 bp, Artificial Sequence; identical to SEQ ID NO: 2177
  source: /note="Description of Artificial Sequence: Synthetic polynucleotide"

SEQ ID NO: 4458 - DNA, 495 bp, Artificial Sequence; identical to SEQ ID NO: 2178
  source: /note="Description of Artificial Sequence: Synthetic polynucleotide"

SEQ ID NO: 4459 - DNA, 495 bp, Artificial Sequence; identical to SEQ ID NO: 2179
  source: /note="Description of Artificial Sequence: Synthetic polynucleotide"

SEQ ID NO: 4460 - DNA, 495 bp, Artificial Sequence; identical to SEQ ID NO: 2180
  source: /note="Description of Artificial Sequence: Synthetic polynucleotide"

SEQ ID NO: 4461 - DNA, 495 bp, Artificial Sequence; identical to SEQ ID NO: 2181
  source: /note="Description of Artificial Sequence: Synthetic polynucleotide"

SEQ ID NO: 4462 - DNA, 495 bp, Artificial Sequence; identical to SEQ ID NO: 2182
  source: /note="Description of Artificial Sequence: Synthetic polynucleotide"

SEQ ID NO: 4463 - DNA, 495 bp, Artificial Sequence; identical to SEQ ID NO: 2183
  source: /note="Description of Artificial Sequence: Synthetic polynucleotide"

SEQ ID NO: 4464 - DNA, 495 bp, Artificial Sequence; identical to SEQ ID NO: 2184
  source: /note="Description of Artificial Sequence: Synthetic polynucleotide"

SEQ ID NO: 4465 - DNA, 495 bp, Artificial Sequence; identical to SEQ ID NO: 2185
  source: /note="Description of Artificial Sequence: Synthetic polynucleotide"

SEQ ID NO: 4466 - DNA, 495 bp, Artificial Sequence; identical to SEQ ID NO: 2186
  source: /note="Description of Artificial Sequence: Synthetic polynucleotide"

SEQ ID NO: 4467 - DNA, 495 bp, Artificial Sequence; identical to SEQ ID NO: 2187
  source: /note="Description of Artificial Sequence: Synthetic polynucleotide"

SEQ ID NO: 4468 - DNA, 495 bp, Artificial Sequence; identical to SEQ ID NO: 2188
  source: /note="Description of Artificial Sequence: Synthetic polynucleotide"

SEQ ID NO: 4469 - DNA, 495 bp, Artificial Sequence; identical to SEQ ID NO: 2189
  source: /note="Description of Artificial Sequence: Synthetic polynucleotide"

SEQ ID NO: 4470 - DNA, 495 bp, Artificial Sequence; identical to SEQ ID NO: 2190
  source: /note="Description of Artificial Sequence: Synthetic polynucleotide"

SEQ ID NO: 4471 - DNA, 495 bp, Artificial Sequence; identical to SEQ ID NO: 2191
  source: /note="Description of Artificial Sequence: Synthetic polynucleotide"

SEQ ID NO: 4472 - DNA, 495 bp, Artificial Sequence; identical to SEQ ID NO: 2192
  source: /note="Description of Artificial Sequence: Synthetic polynucleotide"

SEQ ID NO: 4473 - DNA, 495 bp, Artificial Sequence; identical to SEQ ID NO: 2193
  source: /note="Description of Artificial Sequence: Synthetic polynucleotide"

SEQ ID NO: 4474 - DNA, 495 bp, Artificial Sequence; identical to SEQ ID NO: 2194
  source: /note="Description of Artificial Sequence: Synthetic polynucleotide"

SEQ ID NO: 4475 - DNA, 495 bp, Artificial Sequence; identical to SEQ ID NO: 2195
  source: /note="Description of Artificial Sequence: Synthetic polynucleotide"

SEQ ID NO: 4476 - DNA, 495 bp, Artificial Sequence; identical to SEQ ID NO: 2196
  source: /note="Description of Artificial Sequence: Synthetic polynucleotide"

SEQ ID NO: 4477 - DNA, 495 bp, Artificial Sequence; identical to SEQ ID NO: 2197
  source: /note="Description of Artificial Sequence: Synthetic polynucleotide"

SEQ ID NO: 4478 - DNA, 495 bp, Artificial Sequence; identical to SEQ ID NO: 2198
  source: /note="Description of Artificial Sequence: Synthetic polynucleotide"

SEQ ID NO: 4479 - DNA, 495 bp, Artificial Sequence; identical to SEQ ID NO: 2199
  source: /note="Description of Artificial Sequence: Synthetic polynucleotide"

SEQ ID NO: 4480 - DNA, 495 bp, Artificial Sequence; identical to SEQ ID NO: 2200
  source: /note="Description of Artificial Sequence: Synthetic polynucleotide"

SEQ ID NO: 4481 - DNA, 495 bp, Artificial Sequence; identical to SEQ ID NO: 2201
  source: /note="Description of Artificial Sequence: Synthetic polynucleotide"

SEQ ID NO: 4482 - DNA, 495 bp, Artificial Sequence; identical to SEQ ID NO: 2202
  source: /note="Description of Artificial Sequence: Synthetic polynucleotide"

SEQ ID NO: 4483 - DNA, 495 bp, Artificial Sequence; identical to SEQ ID NO: 2203
  source: /note="Description of Artificial Sequence: Synthetic polynucleotide"

SEQ ID NO: 4484 - DNA, 495 bp, Artificial Sequence; identical to SEQ ID NO: 2204
  source: /note="Description of Artificial Sequence: Synthetic polynucleotide"

SEQ ID NO: 4485 - DNA, 495 bp, Artificial Sequence; identical to SEQ ID NO: 2205
  source: /note="Description of Artificial Sequence: Synthetic polynucleotide"

SEQ ID NO: 4486 - DNA, 495 bp, Artificial Sequence; identical to SEQ ID NO: 2206
  source: /note="Description of Artificial Sequence: Synthetic polynucleotide"

SEQ ID NO: 4487 - DNA, 495 bp, Artificial Sequence; identical to SEQ ID NO: 2207
  source: /note="Description of Artificial Sequence: Synthetic polynucleotide"

SEQ ID NO: 4488 - DNA, 495 bp, Artificial Sequence; identical to SEQ ID NO: 2208
  source: /note="Description of Artificial Sequence: Synthetic polynucleotide"

SEQ ID NO: 4489 - DNA, 495 bp, Artificial Sequence; identical to SEQ ID NO: 2209
  source: /note="Description of Artificial Sequence: Synthetic polynucleotide"

SEQ ID NO: 4490 - DNA, 495 bp, Artificial Sequence; identical to SEQ ID NO: 2210
  source: /note="Description of Artificial Sequence: Synthetic polynucleotide"

SEQ ID NO: 4491 - DNA, 495 bp, Artificial Sequence; identical to SEQ ID NO: 2211
  source: /note="Description of Artificial Sequence: Synthetic polynucleotide"

SEQ ID NO: 4492 - DNA, 495 bp, Artificial Sequence; identical to SEQ ID NO: 2212
  source: /note="Description of Artificial Sequence: Synthetic polynucleotide"

SEQ ID NO: 4493 - DNA, 495 bp, Artificial Sequence; identical to SEQ ID NO: 2213
  source: /note="Description of Artificial Sequence: Synthetic polynucleotide"

SEQ ID NO: 4494 - DNA, 495 bp, Artificial Sequence; identical to SEQ ID NO: 2214
  source: /note="Description of Artificial Sequence: Synthetic polynucleotide"

SEQ ID NO: 4495 - DNA, 495 bp, Artificial Sequence; identical to SEQ ID NO: 2215
  source: /note="Description of Artificial Sequence: Synthetic polynucleotide"

SEQ ID NO: 4496 - DNA, 495 bp, Artificial Sequence; identical to SEQ ID NO: 2216
  source: /note="Description of Artificial Sequence: Synthetic polynucleotide"

SEQ ID NO: 4497 - DNA, 495 bp, Artificial Sequence; identical to SEQ ID NO: 2217
  source: /note="Description of Artificial Sequence: Synthetic polynucleotide"

SEQ ID NO: 4498 - DNA, 495 bp, Artificial Sequence; identical to SEQ ID NO: 2218
  source: /note="Description of Artificial Sequence: Synthetic polynucleotide"

SEQ ID NO: 4499 - DNA, 495 bp, Artificial Sequence; identical to SEQ ID NO: 2219
  source: /note="Description of Artificial Sequence: Synthetic polynucleotide"

SEQ ID NO: 4500 - DNA, 495 bp, Artificial Sequence; identical to SEQ ID NO: 2220
  source: /note="Description of Artificial Sequence: Synthetic polynucleotide"

SEQ ID NO: 4501 - DNA, 495 bp, Artificial Sequence; identical to SEQ ID NO: 2221
  source: /note="Description of Artificial Sequence: Synthetic polynucleotide"

SEQ ID NO: 4502 - DNA, 495 bp, Artificial Sequence; identical to SEQ ID NO: 2222
  source: /note="Description of Artificial Sequence: Synthetic polynucleotide"

SEQ ID NO: 4503 - DNA, 495 bp, Artificial Sequence; identical to SEQ ID NO: 2223
  source: /note="Description of Artificial Sequence: Synthetic polynucleotide"

SEQ ID NO: 4504 - DNA, 495 bp, Artificial Sequence; identical to SEQ ID NO: 2224
  source: /note="Description of Artificial Sequence: Synthetic polynucleotide"

SEQ ID NO: 4505 - DNA, 495 bp, Artificial Sequence; identical to SEQ ID NO: 2225
  source: /note="Description of Artificial Sequence: Synthetic polynucleotide"

SEQ ID NO: 4506 - DNA, 495 bp, Artificial Sequence; identical to SEQ ID NO: 2226
  source: /note="Description of Artificial Sequence: Synthetic polynucleotide"

SEQ ID NO: 4507 - DNA, 495 bp, Artificial Sequence; identical to SEQ ID NO: 2227
  source: /note="Description of Artificial Sequence: Synthetic polynucleotide"

SEQ ID NO: 4508 - DNA, 495 bp, Artificial Sequence; identical to SEQ ID NO: 2228
  source: /note="Description of Artificial Sequence: Synthetic polynucleotide"

SEQ ID NO: 4509 - DNA, 495 bp, Artificial Sequence; identical to SEQ ID NO: 2229
  source: /note="Description of Artificial Sequence: Synthetic polynucleotide"

SEQ ID NO: 4510 - DNA, 495 bp, Artificial Sequence; identical to SEQ ID NO: 2230
  source: /note="Description of Artificial Sequence: Synthetic polynucleotide"

SEQ ID NO: 4511 - DNA, 495 bp, Artificial Sequence; identical to SEQ ID NO: 2231
  source: /note="Description of Artificial Sequence: Synthetic polynucleotide"

SEQ ID NO: 4512 - DNA, 495 bp, Artificial Sequence; identical to SEQ ID NO: 2232
  source: /note="Description of Artificial Sequence: Synthetic polynucleotide"

SEQ ID NO: 4513 - DNA, 495 bp, Artificial Sequence; identical to SEQ ID NO: 2233
  source: /note="Description of Artificial Sequence: Synthetic polynucleotide"

SEQ ID NO: 4514 - DNA, 495 bp, Artificial Sequence; identical to SEQ ID NO: 2234
  source: /note="Description of Artificial Sequence: Synthetic polynucleotide"

SEQ ID NO: 4515 - DNA, 495 bp, Artificial Sequence; identical to SEQ ID NO: 2235
  source: /note="Description of Artificial Sequence: Synthetic polynucleotide"

SEQ ID NO: 4516 - DNA, 495 bp, Artificial Sequence; identical to SEQ ID NO: 2236
  source: /note="Description of Artificial Sequence: Synthetic polynucleotide"

SEQ ID NO: 4517 - DNA, 495 bp, Artificial Sequence; identical to SEQ ID NO: 2237
  source: /note="Description of Artificial Sequence: Synthetic polynucleotide"

SEQ ID NO: 4518 - DNA, 495 bp, Artificial Sequence; identical to SEQ ID NO: 2238
  source: /note="Description of Artificial Sequence: Synthetic polynucleotide"

SEQ ID NO: 4519 - DNA, 495 bp, Artificial Sequence; identical to SEQ ID NO: 2239
  source: /note="Description of Artificial Sequence: Synthetic polynucleotide"

SEQ ID NO: 4520 - DNA, 495 bp, Artificial Sequence; identical to SEQ ID NO: 2240
  source: /note="Description of Artificial Sequence: Synthetic polynucleotide"

SEQ ID NO: 4521 - DNA, 495 bp, Artificial Sequence; identical to SEQ ID NO: 2241
  source: /note="Description of Artificial Sequence: Synthetic polynucleotide"

SEQ ID NO: 4522 - DNA, 495 bp, Artificial Sequence; identical to SEQ ID NO: 2242
  source: /note="Description of Artificial Sequence: Synthetic polynucleotide"

SEQ ID NO: 4523 - DNA, 495 bp, Artificial Sequence; identical to SEQ ID NO: 2243
  source: /note="Description of Artificial Sequence: Synthetic polynucleotide"

SEQ ID NO: 4524 - DNA, 495 bp, Artificial Sequence; identical to SEQ ID NO: 2244
  source: /note="Description of Artificial Sequence: Synthetic polynucleotide"

SEQ ID NO: 4525 - DNA, 495 bp, Artificial Sequence; identical to SEQ ID NO: 2245
  source: /note="Description of Artificial Sequence: Synthetic polynucleotide"

SEQ ID NO: 4526 - DNA, 495 bp, Artificial Sequence; identical to SEQ ID NO: 2246
  source: /note="Description of Artificial Sequence: Synthetic polynucleotide"

SEQ ID NO: 4527 - DNA, 495 bp, Artificial Sequence; identical to SEQ ID NO: 2247
  source: /note="Description of Artificial Sequence: Synthetic polynucleotide"

SEQ ID NO: 4528 - DNA, 495 bp, Artificial Sequence; identical to SEQ ID NO: 2248
  source: /note="Description of Artificial Sequence: Synthetic polynucleotide"

SEQ ID NO: 4529 - DNA, 495 bp, Artificial Sequence; identical to SEQ ID NO: 2249
  source: /note="Description of Artificial Sequence: Synthetic polynucleotide"

SEQ ID NO: 4530 - DNA, 495 bp, Artificial Sequence; identical to SEQ ID NO: 2250
  source: /note="Description of Artificial Sequence: Synthetic polynucleotide"

SEQ ID NO: 4531 - DNA, 495 bp, Artificial Sequence; identical to SEQ ID NO: 2251
  source: /note="Description of Artificial Sequence: Synthetic polynucleotide"

SEQ ID NO: 4532 - DNA, 495 bp, Artificial Sequence; identical to SEQ ID NO: 2252
  source: /note="Description of Artificial Sequence: Synthetic polynucleotide"

SEQ ID NO: 4533 - DNA, 495 bp, Artificial Sequence; identical to SEQ ID NO: 2253
  source: /note="Description of Artificial Sequence: Synthetic polynucleotide"

SEQ ID NO: 4534 - DNA, 495 bp, Artificial Sequence; identical to SEQ ID NO: 2254
  source: /note="Description of Artificial Sequence: Synthetic polynucleotide"

SEQ ID NO: 4535 - DNA, 495 bp, Artificial Sequence; identical to SEQ ID NO: 2255
  source: /note="Description of Artificial Sequence: Synthetic polynucleotide"

SEQ ID NO: 4536 - DNA, 495 bp, Artificial Sequence; identical to SEQ ID NO: 2256
  source: /note="Description of Artificial Sequence: Synthetic polynucleotide"

SEQ ID NO: 4537 - DNA, 495 bp, Artificial Sequence; identical to SEQ ID NO: 2257
  source: /note="Description of Artificial Sequence: Synthetic polynucleotide"

SEQ ID NO: 4538 - DNA, 495 bp, Artificial Sequence; identical to SEQ ID NO: 2258
  source: /note="Description of Artificial Sequence: Synthetic polynucleotide"

SEQ ID NO: 4539 - DNA, 495 bp, Artificial Sequence; identical to SEQ ID NO: 2259
  source: /note="Description of Artificial Sequence: Synthetic polynucleotide"

SEQ ID NO: 4540 - DNA, 495 bp, Artificial Sequence; identical to SEQ ID NO: 2260
  source: /note="Description of Artificial Sequence: Synthetic polynucleotide"

SEQ ID NO: 4541 - DNA, 495 bp, Artificial Sequence; identical to SEQ ID NO: 2261
  source: /note="Description of Artificial Sequence: Synthetic polynucleotide"

SEQ ID NO: 4542 - DNA, 495 bp, Artificial Sequence; identical to SEQ ID NO: 2262
  source: /note="Description of Artificial Sequence: Synthetic polynucleotide"

SEQ ID NO: 4543 - DNA, 495 bp, Artificial Sequence; identical to SEQ ID NO: 2263
  source: /note="Description of Artificial Sequence: Synthetic polynucleotide"

SEQ ID NO: 4544 - DNA, 495 bp, Artificial Sequence; identical to SEQ ID NO: 2264
  source: /note="Description of Artificial Sequence: Synthetic polynucleotide"

SEQ ID NO: 4545 - DNA, 495 bp, Artificial Sequence; identical to SEQ ID NO: 2265
  source: /note="Description of Artificial Sequence: Synthetic polynucleotide"

SEQ ID NO: 4546 - DNA, 495 bp, Artificial Sequence; identical to SEQ ID NO: 2266
  source: /note="Description of Artificial Sequence: Synthetic polynucleotide"

SEQ ID NO: 4547 - DNA, 495 bp, Artificial Sequence; identical to SEQ ID NO: 2267
  source: /note="Description of Artificial Sequence: Synthetic polynucleotide"

SEQ ID NO: 4548 - DNA, 495 bp, Artificial Sequence; identical to SEQ ID NO: 2268
  source: /note="Description of Artificial Sequence: Synthetic polynucleotide"

SEQ ID NO: 4549 - DNA, 495 bp, Artificial Sequence; identical to SEQ ID NO: 2269
  source: /note="Description of Artificial Sequence: Synthetic polynucleotide"

SEQ ID NO: 4550 - DNA, 495 bp, Artificial Sequence; identical to SEQ ID NO: 2270
  source: /note="Description of Artificial Sequence: Synthetic polynucleotide"

SEQ ID NO: 4551 - DNA, 495 bp, Artificial Sequence; identical to SEQ ID NO: 2271
  source: /note="Description of Artificial Sequence: Synthetic polynucleotide"

SEQ ID NO: 4552 - DNA, 495 bp, Artificial Sequence; identical to SEQ ID NO: 2272
  source: /note="Description of Artificial Sequence: Synthetic polynucleotide"

SEQ ID NO: 4553 - DNA, 495 bp, Artificial Sequence; identical to SEQ ID NO: 2273
  source: /note="Description of Artificial Sequence: Synthetic polynucleotide"

SEQ ID NO: 4554 - DNA, 495 bp, Artificial Sequence; identical to SEQ ID NO: 2274
  source: /note="Description of Artificial Sequence: Synthetic polynucleotide"

SEQ ID NO: 4555 - DNA, 495 bp, Artificial Sequence; identical to SEQ ID NO: 2275
  source: /note="Description of Artificial Sequence: Synthetic polynucleotide"

SEQ ID NO: 4556 - DNA, 495 bp, Artificial Sequence; identical to SEQ ID NO: 2276
  source: /note="Description of Artificial Sequence: Synthetic polynucleotide"

SEQ ID NO: 4557 - DNA, 495 bp, Artificial Sequence; identical to SEQ ID NO: 2277
  source: /note="Description of Artificial Sequence: Synthetic polynucleotide"

SEQ ID NO: 4558 - DNA, 495 bp, Artificial Sequence; identical to SEQ ID NO: 2278
  source: /note="Description of Artificial Sequence: Synthetic polynucleotide"

SEQ ID NO: 4559 - DNA, 495 bp, Artificial Sequence; identical to SEQ ID NO: 2279
  source: /note="Description of Artificial Sequence: Synthetic polynucleotide"

SEQ ID NO: 4560 - DNA, 495 bp, Artificial Sequence; identical to SEQ ID NO: 2280
  source: /note="Description of Artificial Sequence: Synthetic polynucleotide"

SEQ ID NO: 4561 - DNA, 495 bp, Artificial Sequence; identical to SEQ ID NO: 2281
  source: /note="Description of Artificial Sequence: Synthetic polynucleotide"

SEQ ID NO: 4562 - DNA, 495 bp, Artificial Sequence; identical to SEQ ID NO: 2282
  source: /note="Description of Artificial Sequence: Synthetic polynucleotide"

SEQ ID NO: 4563 - DNA, 495 bp, Artificial Sequence; identical to SEQ ID NO: 2283
  source: /note="Description of Artificial Sequence: Synthetic polynucleotide"

SEQ ID NO: 4564 - DNA, 495 bp, Artificial Sequence; identical to SEQ ID NO: 2284
  source: /note="Description of Artificial Sequence: Synthetic polynucleotide"

SEQ ID NO: 4565 - DNA, 495 bp, Artificial Sequence; identical to SEQ ID NO: 2285
  source: /note="Description of Artificial Sequence: Synthetic polynucleotide"

SEQ ID NO: 4566 - DNA, 495 bp, Artificial Sequence; identical to SEQ ID NO: 2286
  source: /note="Description of Artificial Sequence: Synthetic polynucleotide"

SEQ ID NO: 4567 - DNA, 495 bp, Artificial Sequence; identical to SEQ ID NO: 2287
  source: /note="Description of Artificial Sequence: Synthetic polynucleotide"

SEQ ID NO: 4568 - DNA, 495 bp, Artificial Sequence; identical to SEQ ID NO: 2288
  source: /note="Description of Artificial Sequence: Synthetic polynucleotide"

SEQ ID NO: 4569 - DNA, 495 bp, Artificial Sequence; identical to SEQ ID NO: 2289
  source: /note="Description of Artificial Sequence: Synthetic polynucleotide"

SEQ ID NO: 4570 - DNA, 495 bp, Artificial Sequence; identical to SEQ ID NO: 2290
  source: /note="Description of Artificial Sequence: Synthetic polynucleotide"

SEQ ID NO: 4571 - DNA, 495 bp, Artificial Sequence; identical to SEQ ID NO: 2291
  source: /note="Description of Artificial Sequence: Synthetic polynucleotide"

SEQ ID NO: 4572 - DNA, 495 bp, Artificial Sequence; identical to SEQ ID NO: 2292
  source: /note="Description of Artificial Sequence: Synthetic polynucleotide"

SEQ ID NO: 4573 - DNA, 495 bp, Artificial Sequence; identical to SEQ ID NO: 2293
  source: /note="Description of Artificial Sequence: Synthetic polynucleotide"

SEQ ID NO: 4574 - DNA, 495 bp, Artificial Sequence; identical to SEQ ID NO: 2294
  source: /note="Description of Artificial Sequence: Synthetic polynucleotide"

SEQ ID NO: 4575 - DNA, 495 bp, Artificial Sequence; identical to SEQ ID NO: 2295
  source: /note="Description of Artificial Sequence: Synthetic polynucleotide"

SEQ ID NO: 4576 - DNA, 495 bp, Artificial Sequence; identical to SEQ ID NO: 2296
  source: /note="Description of Artificial Sequence: Synthetic polynucleotide"

SEQ ID NO: 4577 - DNA, 495 bp, Artificial Sequence; identical to SEQ ID NO: 2297
  source: /note="Description of Artificial Sequence: Synthetic polynucleotide"

SEQ ID NO: 4578 - DNA, 495 bp, Artificial Sequence; identical to SEQ ID NO: 2298
  source: /note="Description of Artificial Sequence: Synthetic polynucleotide"

SEQ ID NO: 4579 - DNA, 448 bp, Artificial Sequence; identical to SEQ ID NO: 2299
  source: /note="Description of Artificial Sequence: Synthetic polynucleotide"

SEQ ID NO: 4580 - DNA, 495 bp, Artificial Sequence; identical to SEQ ID NO: 2300
  source: /note="Description of Artificial Sequence: Synthetic polynucleotide"

SEQ ID NO: 4581 - DNA, 495 bp, Artificial Sequence; identical to SEQ ID NO: 2301
  source: /note="Description of Artificial Sequence: Synthetic polynucleotide"

SEQ ID NO: 4582 - DNA, 495 bp, Artificial Sequence; identical to SEQ ID NO: 2302
  source: /note="Description of Artificial Sequence: Synthetic polynucleotide"

SEQ ID NO: 4583 - DNA, 495 bp, Artificial Sequence; identical to SEQ ID NO: 2303
  source: /note="Description of Artificial Sequence: Synthetic polynucleotide"

SEQ ID NO: 4584 - DNA, 495 bp, Artificial Sequence; identical to SEQ ID NO: 2304
  source: /note="Description of Artificial Sequence: Synthetic polynucleotide"

SEQ ID NO: 4585 - DNA, 495 bp, Artificial Sequence; identical to SEQ ID NO: 2305
  source: /note="Description of Artificial Sequence: Synthetic polynucleotide"

SEQ ID NO: 4586 - DNA, 495 bp, Artificial Sequence; identical to SEQ ID NO: 2306
  source: /note="Description of Artificial Sequence: Synthetic polynucleotide"

SEQ ID NO: 4587 - DNA, 495 bp, Artificial Sequence; identical to SEQ ID NO: 2307
  source: /note="Description of Artificial Sequence: Synthetic polynucleotide"

SEQ ID NO: 4588 - DNA, 495 bp, Artificial Sequence; identical to SEQ ID NO: 2308
  source: /note="Description of Artificial Sequence: Synthetic polynucleotide"

SEQ ID NO: 4589 - DNA, 495 bp, Artificial Sequence; identical to SEQ ID NO: 2309
  source: /note="Description of Artificial Sequence: Synthetic polynucleotide"

SEQ ID NO: 4590 - DNA, 495 bp, Artificial Sequence; identical to SEQ ID NO: 2310
  source: /note="Description of Artificial Sequence: Synthetic polynucleotide"

SEQ ID NO: 4591 - DNA, 495 bp, Artificial Sequence; identical to SEQ ID NO: 2311
  source: /note="Description of Artificial Sequence: Synthetic polynucleotide"

SEQ ID NO: 4592 - DNA, 495 bp, Artificial Sequence; identical to SEQ ID NO: 2312
  source: /note="Description of Artificial Sequence: Synthetic polynucleotide"

SEQ ID NO: 4593 - DNA, 495 bp, Artificial Sequence; identical to SEQ ID NO: 2313
  source: /note="Description of Artificial Sequence: Synthetic polynucleotide"

SEQ ID NO: 4594 - DNA, 495 bp, Artificial Sequence; identical to SEQ ID NO: 2314
  source: /note="Description of Artificial Sequence: Synthetic polynucleotide"

SEQ ID NO: 4595 - DNA, 495 bp, Artificial Sequence; identical to SEQ ID NO: 2315
  source: /note="Description of Artificial Sequence: Synthetic polynucleotide"

SEQ ID NO: 4596 - DNA, 495 bp, Artificial Sequence; identical to SEQ ID NO: 2316
  source: /note="Description of Artificial Sequence: Synthetic polynucleotide"

SEQ ID NO: 4597 - DNA, 495 bp, Artificial Sequence; identical to SEQ ID NO: 2317
  source: /note="Description of Artificial Sequence: Synthetic polynucleotide"

SEQ ID NO: 4598 - DNA, 495 bp, Artificial Sequence; identical to SEQ ID NO: 2318
  source: /note="Description of Artificial Sequence: Synthetic polynucleotide"

SEQ ID NO: 4599 - DNA, 495 bp, Artificial Sequence; identical to SEQ ID NO: 2319
  source: /note="Description of Artificial Sequence: Synthetic polynucleotide"

SEQ ID NO: 4600 - DNA, 495 bp, Artificial Sequence; identical to SEQ ID NO: 2320
  source: /note="Description of Artificial Sequence: Synthetic polynucleotide"

SEQ ID NO: 4601 - DNA, 495 bp, Artificial Sequence; identical to SEQ ID NO: 2321
  source: /note="Description of Artificial Sequence: Synthetic polynucleotide"

SEQ ID NO: 4602 - DNA, 495 bp, Artificial Sequence; identical to SEQ ID NO: 2322
  source: /note="Description of Artificial Sequence: Synthetic polynucleotide"

SEQ ID NO: 4603 - DNA, 495 bp, Artificial Sequence; identical to SEQ ID NO: 2323
  source: /note="Description of Artificial Sequence: Synthetic polynucleotide"

SEQ ID NO: 4604 - DNA, 495 bp, Artificial Sequence; identical to SEQ ID NO: 2324
  source: /note="Description of Artificial Sequence: Synthetic polynucleotide"

SEQ ID NO: 4605 - DNA, 495 bp, Artificial Sequence; identical to SEQ ID NO: 2325
  source: /note="Description of Artificial Sequence: Synthetic polynucleotide"

SEQ ID NO: 4606 - DNA, 495 bp, Artificial Sequence; identical to SEQ ID NO: 2326
  source: /note="Description of Artificial Sequence: Synthetic polynucleotide"

SEQ ID NO: 4607 - DNA, 495 bp, Artificial Sequence; identical to SEQ ID NO: 2327
  source: /note="Description of Artificial Sequence: Synthetic polynucleotide"

SEQ ID NO: 4608 - DNA, 495 bp, Artificial Sequence; identical to SEQ ID NO: 2328
  source: /note="Description of Artificial Sequence: Synthetic polynucleotide"

SEQ ID NO: 4609 - DNA, 495 bp, Artificial Sequence; identical to SEQ ID NO: 2329
  source: /note="Description of Artificial Sequence: Synthetic polynucleotide"

SEQ ID NO: 4610 - DNA, 495 bp, Artificial Sequence; identical to SEQ ID NO: 2330
  source: /note="Description of Artificial Sequence: Synthetic polynucleotide"

SEQ ID NO: 4611 - DNA, 495 bp, Artificial Sequence; identical to SEQ ID NO: 2331
  source: /note="Description of Artificial Sequence: Synthetic polynucleotide"

SEQ ID NO: 4612 - DNA, 495 bp, Artificial Sequence; identical to SEQ ID NO: 2332
  source: /note="Description of Artificial Sequence: Synthetic polynucleotide"

SEQ ID NO: 4613 - DNA, 495 bp, Artificial Sequence; identical to SEQ ID NO: 2333
  source: /note="Description of Artificial Sequence: Synthetic polynucleotide"

SEQ ID NO: 4614 - DNA, 495 bp, Artificial Sequence; identical to SEQ ID NO: 2334
  source: /note="Description of Artificial Sequence: Synthetic polynucleotide"

SEQ ID NO: 4615 - DNA, 495 bp, Artificial Sequence; identical to SEQ ID NO: 2335
  source: /note="Description of Artificial Sequence: Synthetic polynucleotide"

SEQ ID NO: 4616 - DNA, 495 bp, Artificial Sequence; identical to SEQ ID NO: 2336
  source: /note="Description of Artificial Sequence: Synthetic polynucleotide"

SEQ ID NO: 4617 - DNA, 495 bp, Artificial Sequence; identical to SEQ ID NO: 2337
  source: /note="Description of Artificial Sequence: Synthetic polynucleotide"

SEQ ID NO: 4618 - DNA, 495 bp, Artificial Sequence; identical to SEQ ID NO: 2338
  source: /note="Description of Artificial Sequence: Synthetic polynucleotide"

SEQ ID NO: 4619 - DNA, 495 bp, Artificial Sequence; identical to SEQ ID NO: 2339
  source: /note="Description of Artificial Sequence: Synthetic polynucleotide"

SEQ ID NO: 4620 - DNA, 495 bp, Artificial Sequence; identical to SEQ ID NO: 2340
  source: /note="Description of Artificial Sequence: Synthetic polynucleotide"

SEQ ID NO: 4621 - DNA, 495 bp, Artificial Sequence; identical to SEQ ID NO: 2341
  source: /note="Description of Artificial Sequence: Synthetic polynucleotide"

SEQ ID NO: 4622 - DNA, 495 bp, Artificial Sequence; identical to SEQ ID NO: 2342
  source: /note="Description of Artificial Sequence: Synthetic polynucleotide"

SEQ ID NO: 4623 - DNA, 495 bp, Artificial Sequence; identical to SEQ ID NO: 2343
  source: /note="Description of Artificial Sequence: Synthetic polynucleotide"

SEQ ID NO: 4624 - DNA, 495 bp, Artificial Sequence; identical to SEQ ID NO: 2344
  source: /note="Description of Artificial Sequence: Synthetic polynucleotide"

SEQ ID NO: 4625 - DNA, 495 bp, Artificial Sequence; identical to SEQ ID NO: 2345
  source: /note="Description of Artificial Sequence: Synthetic polynucleotide"

SEQ ID NO: 4626 - DNA, 495 bp, Artificial Sequence; identical to SEQ ID NO: 2346
  source: /note="Description of Artificial Sequence: Synthetic polynucleotide"

SEQ ID NO: 4627 - DNA, 495 bp, Artificial Sequence; identical to SEQ ID NO: 2347
  source: /note="Description of Artificial Sequence: Synthetic polynucleotide"

SEQ ID NO: 4628 - DNA, 495 bp, Artificial Sequence; identical to SEQ ID NO: 2348
  source: /note="Description of Artificial Sequence: Synthetic polynucleotide"

SEQ ID NO: 4629 - DNA, 495 bp, Artificial Sequence; identical to SEQ ID NO: 2349
  source: /note="Description of Artificial Sequence: Synthetic polynucleotide"

SEQ ID NO: 4630 - DNA, 495 bp, Artificial Sequence; identical to SEQ ID NO: 2350
  source: /note="Description of Artificial Sequence: Synthetic polynucleotide"

SEQ ID NO: 4631 - DNA, 495 bp, Artificial Sequence; identical to SEQ ID NO: 2351
  source: /note="Description of Artificial Sequence: Synthetic polynucleotide"

SEQ ID NO: 4632 - DNA, 495 bp, Artificial Sequence; identical to SEQ ID NO: 2352
  source: /note="Description of Artificial Sequence: Synthetic polynucleotide"

SEQ ID NO: 4633 - DNA, 495 bp, Artificial Sequence; identical to SEQ ID NO: 2353
  source: /note="Description of Artificial Sequence: Synthetic polynucleotide"

SEQ ID NO: 4634 - DNA, 495 bp, Artificial Sequence; identical to SEQ ID NO: 2354
  source: /note="Description of Artificial Sequence: Synthetic polynucleotide"

SEQ ID NO: 4635 - DNA, 495 bp, Artificial Sequence; identical to SEQ ID NO: 2355
  source: /note="Description of Artificial Sequence: Synthetic polynucleotide"

SEQ ID NO: 4636 - DNA, 495 bp, Artificial Sequence; identical to SEQ ID NO: 2356
  source: /note="Description of Artificial Sequence: Synthetic polynucleotide"

SEQ ID NO: 4637 - DNA, 495 bp, Artificial Sequence; identical to SEQ ID NO: 2357
  source: /note="Description of Artificial Sequence: Synthetic polynucleotide"

SEQ ID NO: 4638 - DNA, 495 bp, Artificial Sequence; identical to SEQ ID NO: 2358
  source: /note="Description of Artificial Sequence: Synthetic polynucleotide"

SEQ ID NO: 4639 - DNA, 495 bp, Artificial Sequence; identical to SEQ ID NO: 2359
  source: /note="Description of Artificial Sequence: Synthetic polynucleotide"

SEQ ID NO: 4640 - DNA, 495 bp, Artificial Sequence; identical to SEQ ID NO: 2360
  source: /note="Description of Artificial Sequence: Synthetic polynucleotide"

SEQ ID NO: 4641 - DNA, 495 bp, Artificial Sequence; identical to SEQ ID NO: 2361
  source: /note="Description of Artificial Sequence: Synthetic polynucleotide"

SEQ ID NO: 4642 - DNA, 495 bp, Artificial Sequence; identical to SEQ ID NO: 2362
  source: /note="Description of Artificial Sequence: Synthetic polynucleotide"

SEQ ID NO: 4643 - DNA, 495 bp, Artificial Sequence; identical to SEQ ID NO: 2363
  source: /note="Description of Artificial Sequence: Synthetic polynucleotide"

SEQ ID NO: 4644 - DNA, 495 bp, Artificial Sequence; identical to SEQ ID NO: 2364
  source: /note="Description of Artificial Sequence: Synthetic polynucleotide"

SEQ ID NO: 4645 - DNA, 495 bp, Artificial Sequence; identical to SEQ ID NO: 2365
  source: /note="Description of Artificial Sequence: Synthetic polynucleotide"

SEQ ID NO: 4646 - DNA, 495 bp, Artificial Sequence; identical to SEQ ID NO: 2366
  source: /note="Description of Artificial Sequence: Synthetic polynucleotide"

SEQ ID NO: 4647 - DNA, 495 bp, Artificial Sequence; identical to SEQ ID NO: 2367
  source: /note="Description of Artificial Sequence: Synthetic polynucleotide"

SEQ ID NO: 4648 - DNA, 495 bp, Artificial Sequence; identical to SEQ ID NO: 2368
  source: /note="Description of Artificial Sequence: Synthetic polynucleotide"

SEQ ID NO: 4649 - DNA, 495 bp, Artificial Sequence; identical to SEQ ID NO: 2369
  source: /note="Description of Artificial Sequence: Synthetic polynucleotide"

SEQ ID NO: 4650 - DNA, 495 bp, Artificial Sequence; identical to SEQ ID NO: 2370
  source: /note="Description of Artificial Sequence: Synthetic polynucleotide"

SEQ ID NO: 4651 - DNA, 495 bp, Artificial Sequence; identical to SEQ ID NO: 2371
  source: /note="Description of Artificial Sequence: Synthetic polynucleotide"

SEQ ID NO: 4652 - DNA, 495 bp, Artificial Sequence; identical to SEQ ID NO: 2372
  source: /note="Description of Artificial Sequence: Synthetic polynucleotide"

SEQ ID NO: 4653 - DNA, 495 bp, Artificial Sequence; identical to SEQ ID NO: 2373
  source: /note="Description of Artificial Sequence: Synthetic polynucleotide"

SEQ ID NO: 4654 - DNA, 495 bp, Artificial Sequence; identical to SEQ ID NO: 2374
  source: /note="Description of Artificial Sequence: Synthetic polynucleotide"

SEQ ID NO: 4655 - DNA, 495 bp, Artificial Sequence; identical to SEQ ID NO: 2375
  source: /note="Description of Artificial Sequence: Synthetic polynucleotide"

SEQ ID NO: 4656 - DNA, 495 bp, Artificial Sequence; identical to SEQ ID NO: 2376
  source: /note="Description of Artificial Sequence: Synthetic polynucleotide"

SEQ ID NO: 4657 - DNA, 495 bp, Artificial Sequence; identical to SEQ ID NO: 2377
  source: /note="Description of Artificial Sequence: Synthetic polynucleotide"

SEQ ID NO: 4658 - DNA, 495 bp, Artificial Sequence; identical to SEQ ID NO: 2378
  source: /note="Description of Artificial Sequence: Synthetic polynucleotide"

SEQ ID NO: 4659 - DNA, 495 bp, Artificial Sequence; identical to SEQ ID NO: 2379
  source: /note="Description of Artificial Sequence: Synthetic polynucleotide"

SEQ ID NO: 4660 - DNA, 495 bp, Artificial Sequence; identical to SEQ ID NO: 2380
  source: /note="Description of Artificial Sequence: Synthetic polynucleotide"

SEQ ID NO: 4661 - DNA, 495 bp, Artificial Sequence; identical to SEQ ID NO: 2381
  source: /note="Description of Artificial Sequence: Synthetic polynucleotide"

SEQ ID NO: 4662 - DNA, 495 bp, Artificial Sequence; identical to SEQ ID NO: 2382
  source: /note="Description of Artificial Sequence: Synthetic polynucleotide"

SEQ ID NO: 4663 - DNA, 495 bp, Artificial Sequence; identical to SEQ ID NO: 2383
  source: /note="Description of Artificial Sequence: Synthetic polynucleotide"

SEQ ID NO: 4664 - DNA, 495 bp, Artificial Sequence; identical to SEQ ID NO: 2384
  source: /note="Description of Artificial Sequence: Synthetic polynucleotide"

SEQ ID NO: 4665 - DNA, 495 bp, Artificial Sequence; identical to SEQ ID NO: 2385
  source: /note="Description of Artificial Sequence: Synthetic polynucleotide"

SEQ ID NO: 4666 - DNA, 495 bp, Artificial Sequence; identical to SEQ ID NO: 2386
  source: /note="Description of Artificial Sequence: Synthetic polynucleotide"

SEQ ID NO: 4667 - DNA, 495 bp, Artificial Sequence; identical to SEQ ID NO: 2387
  source: /note="Description of Artificial Sequence: Synthetic polynucleotide"

SEQ ID NO: 4668 - DNA, 495 bp, Artificial Sequence; identical to SEQ ID NO: 2388
  source: /note="Description of Artificial Sequence: Synthetic polynucleotide"

SEQ ID NO: 4669 - DNA, 495 bp, Artificial Sequence; identical to SEQ ID NO: 2389
  source: /note="Description of Artificial Sequence: Synthetic polynucleotide"

SEQ ID NO: 4670 - DNA, 495 bp, Artificial Sequence; identical to SEQ ID NO: 2390
  source: /note="Description of Artificial Sequence: Synthetic polynucleotide"

SEQ ID NO: 4671 - DNA, 495 bp, Artificial Sequence; identical to SEQ ID NO: 2391
  source: /note="Description of Artificial Sequence: Synthetic polynucleotide"

SEQ ID NO: 4672 - DNA, 495 bp, Artificial Sequence; identical to SEQ ID NO: 2392
  source: /note="Description of Artificial Sequence: Synthetic polynucleotide"

SEQ ID NO: 4673 - DNA, 495 bp, Artificial Sequence; identical to SEQ ID NO: 2393
  source: /note="Description of Artificial Sequence: Synthetic polynucleotide"

SEQ ID NO: 4674 - DNA, 495 bp, Artificial Sequence; identical to SEQ ID NO: 2394
  source: /note="Description of Artificial Sequence: Synthetic polynucleotide"

SEQ ID NO: 4675 - DNA, 495 bp, Artificial Sequence; identical to SEQ ID NO: 2395
  source: /note="Description of Artificial Sequence: Synthetic polynucleotide"

SEQ ID NO: 4676 - DNA, 495 bp, Artificial Sequence; identical to SEQ ID NO: 2396
  source: /note="Description of Artificial Sequence: Synthetic polynucleotide"

SEQ ID NO: 4677 - DNA, 495 bp, Artificial Sequence; identical to SEQ ID NO: 2397
  source: /note="Description of Artificial Sequence: Synthetic polynucleotide"

SEQ ID NO: 4678 - DNA, 495 bp, Artificial Sequence; identical to SEQ ID NO: 2398
  source: /note="Description of Artificial Sequence: Synthetic polynucleotide"

SEQ ID NO: 4679 - DNA, 495 bp, Artificial Sequence; identical to SEQ ID NO: 2399
  source: /note="Description of Artificial Sequence: Synthetic polynucleotide"

SEQ ID NO: 4680 - DNA, 495 bp, Artificial Sequence; identical to SEQ ID NO: 2400
  source: /note="Description of Artificial Sequence: Synthetic polynucleotide"

SEQ ID NO: 4681 - DNA, 495 bp, Artificial Sequence; identical to SEQ ID NO: 2401
  source: /note="Description of Artificial Sequence: Synthetic polynucleotide"

SEQ ID NO: 4682 - DNA, 495 bp, Artificial Sequence; identical to SEQ ID NO: 2402
  source: /note="Description of Artificial Sequence: Synthetic polynucleotide"

SEQ ID NO: 4683 - DNA, 495 bp, Artificial Sequence; identical to SEQ ID NO: 2403
  source: /note="Description of Artificial Sequence: Synthetic polynucleotide"

SEQ ID NO: 4684 - DNA, 495 bp, Artificial Sequence; identical to SEQ ID NO: 2404
  source: /note="Description of Artificial Sequence: Synthetic polynucleotide"

SEQ ID NO: 4685 - DNA, 495 bp, Artificial Sequence; identical to SEQ ID NO: 2405
  source: /note="Description of Artificial Sequence: Synthetic polynucleotide"

SEQ ID NO: 4686 - DNA, 495 bp, Artificial Sequence; identical to SEQ ID NO: 2406
  source: /note="Description of Artificial Sequence: Synthetic polynucleotide"

SEQ ID NO: 4687 - DNA, 495 bp, Artificial Sequence; identical to SEQ ID NO: 2407
  source: /note="Description of Artificial Sequence: Synthetic polynucleotide"

SEQ ID NO: 4688 - DNA, 495 bp, Artificial Sequence; identical to SEQ ID NO: 2408
  source: /note="Description of Artificial Sequence: Synthetic polynucleotide"

SEQ ID NO: 4689 - DNA, 495 bp, Artificial Sequence; identical to SEQ ID NO: 2409
  source: /note="Description of Artificial Sequence: Synthetic polynucleotide"

SEQ ID NO: 4690 - DNA, 495 bp, Artificial Sequence; identical to SEQ ID NO: 2410
  source: /note="Description of Artificial Sequence: Synthetic polynucleotide"

SEQ ID NO: 4691 - DNA, 495 bp, Artificial Sequence; identical to SEQ ID NO: 2411
  source: /note="Description of Artificial Sequence: Synthetic polynucleotide"

SEQ ID NO: 4692 - DNA, 495 bp, Artificial Sequence; identical to SEQ ID NO: 2412
  source: /note="Description of Artificial Sequence: Synthetic polynucleotide"

SEQ ID NO: 4693 - DNA, 495 bp, Artificial Sequence; identical to SEQ ID NO: 2413
  source: /note="Description of Artificial Sequence: Synthetic polynucleotide"

SEQ ID NO: 4694 - DNA, 495 bp, Artificial Sequence; identical to SEQ ID NO: 2414
  source: /note="Description of Artificial Sequence: Synthetic polynucleotide"

SEQ ID NO: 4695 - DNA, 495 bp, Artificial Sequence; identical to SEQ ID NO: 2415
  source: /note="Description of Artificial Sequence: Synthetic polynucleotide"

SEQ ID NO: 4696 - DNA, 495 bp, Artificial Sequence; identical to SEQ ID NO: 2416
  source: /note="Description of Artificial Sequence: Synthetic polynucleotide"

SEQ ID NO: 4697 - DNA, 495 bp, Artificial Sequence; identical to SEQ ID NO: 2417
  source: /note="Description of Artificial Sequence: Synthetic polynucleotide"

SEQ ID NO: 4698 - DNA, 495 bp, Artificial Sequence; identical to SEQ ID NO: 2418
  source: /note="Description of Artificial Sequence: Synthetic polynucleotide"

SEQ ID NO: 4699 - DNA, 495 bp, Artificial Sequence; identical to SEQ ID NO: 2419
  source: /note="Description of Artificial Sequence: Synthetic polynucleotide"

SEQ ID NO: 4700 - DNA, 495 bp, Artificial Sequence; identical to SEQ ID NO: 2420
  source: /note="Description of Artificial Sequence: Synthetic polynucleotide"

SEQ ID NO: 4701 - DNA, 495 bp, Artificial Sequence; identical to SEQ ID NO: 2421
  source: /note="Description of Artificial Sequence: Synthetic polynucleotide"

SEQ ID NO: 4702 - DNA, 495 bp, Artificial Sequence; identical to SEQ ID NO: 2422
  source: /note="Description of Artificial Sequence: Synthetic polynucleotide"

SEQ ID NO: 4703 - DNA, 448 bp, Artificial Sequence; identical to SEQ ID NO: 2423
  source: /note="Description of Artificial Sequence: Synthetic polynucleotide"

SEQ ID NO: 4704 - DNA, 495 bp, Artificial Sequence; identical to SEQ ID NO: 2424
  source: /note="Description of Artificial Sequence: Synthetic polynucleotide"

SEQ ID NO: 4705 - DNA, 495 bp, Artificial Sequence; identical to SEQ ID NO: 2425
  source: /note="Description of Artificial Sequence: Synthetic polynucleotide"

SEQ ID NO: 4706 - DNA, 495 bp, Artificial Sequence; identical to SEQ ID NO: 2426
  source: /note="Description of Artificial Sequence: Synthetic polynucleotide"

SEQ ID NO: 4707 - DNA, 495 bp, Artificial Sequence; identical to SEQ ID NO: 2427
  source: /note="Description of Artificial Sequence: Synthetic polynucleotide"

SEQ ID NO: 4708 - DNA, 495 bp, Artificial Sequence; identical to SEQ ID NO: 2428
  source: /note="Description of Artificial Sequence: Synthetic polynucleotide"

SEQ ID NO: 4709 - DNA, 495 bp, Artificial Sequence; identical to SEQ ID NO: 2429
  source: /note="Description of Artificial Sequence: Synthetic polynucleotide"

SEQ ID NO: 4710 - DNA, 495 bp, Artificial Sequence; identical to SEQ ID NO: 2430
  source: /note="Description of Artificial Sequence: Synthetic polynucleotide"

SEQ ID NO: 4711 - DNA, 495 bp, Artificial Sequence; identical to SEQ ID NO: 2431
  source: /note="Description of Artificial Sequence: Synthetic polynucleotide"

SEQ ID NO: 4712 - DNA, 495 bp, Artificial Sequence; identical to SEQ ID NO: 2432
  source: /note="Description of Artificial Sequence: Synthetic polynucleotide"

SEQ ID NO: 4713 - DNA, 495 bp, Artificial Sequence; identical to SEQ ID NO: 2433
  source: /note="Description of Artificial Sequence: Synthetic polynucleotide"

SEQ ID NO: 4714 - DNA, 495 bp, Artificial Sequence; identical to SEQ ID NO: 2434
  source: /note="Description of Artificial Sequence: Synthetic polynucleotide"

SEQ ID NO: 4715 - DNA, 495 bp, Artificial Sequence; identical to SEQ ID NO: 2435
  source: /note="Description of Artificial Sequence: Synthetic polynucleotide"

SEQ ID NO: 4716 - DNA, 495 bp, Artificial Sequence; identical to SEQ ID NO: 2436
  source: /note="Description of Artificial Sequence: Synthetic polynucleotide"

SEQ ID NO: 4717 - DNA, 495 bp, Artificial Sequence; identical to SEQ ID NO: 2437
  source: /note="Description of Artificial Sequence: Synthetic polynucleotide"

SEQ ID NO: 4718 - DNA, 495 bp, Artificial Sequence; identical to SEQ ID NO: 2438
  source: /note="Description of Artificial Sequence: Synthetic polynucleotide"

SEQ ID NO: 4719 - DNA, 495 bp, Artificial Sequence; identical to SEQ ID NO: 2439
  source: /note="Description of Artificial Sequence: Synthetic polynucleotide"

SEQ ID NO: 4720 - DNA, 495 bp, Artificial Sequence; identical to SEQ ID NO: 2440
  source: /note="Description of Artificial Sequence: Synthetic polynucleotide"

SEQ ID NO: 4721 - DNA, 495 bp, Artificial Sequence; identical to SEQ ID NO: 2441
  source: /note="Description of Artificial Sequence: Synthetic polynucleotide"

SEQ ID NO: 4722 - DNA, 495 bp, Artificial Sequence; identical to SEQ ID NO: 2442
  source: /note="Description of Artificial Sequence: Synthetic polynucleotide"

SEQ ID NO: 4723 - DNA, 495 bp, Artificial Sequence; identical to SEQ ID NO: 2443
  source: /note="Description of Artificial Sequence: Synthetic polynucleotide"

SEQ ID NO: 4724 - DNA, 495 bp, Artificial Sequence; identical to SEQ ID NO: 2444
  source: /note="Description of Artificial Sequence: Synthetic polynucleotide"

SEQ ID NO: 4725 - DNA, 495 bp, Artificial Sequence; identical to SEQ ID NO: 2445
  source: /note="Description of Artificial Sequence: Synthetic polynucleotide"

SEQ ID NO: 4726 - DNA, 495 bp, Artificial Sequence; identical to SEQ ID NO: 2446
  source: /note="Description of Artificial Sequence: Synthetic polynucleotide"

SEQ ID NO: 4727 - DNA, 495 bp, Artificial Sequence; identical to SEQ ID NO: 2447
  source: /note="Description of Artificial Sequence: Synthetic polynucleotide"

SEQ ID NO: 4728 - DNA, 495 bp, Artificial Sequence; identical to SEQ ID NO: 2448
  source: /note="Description of Artificial Sequence: Synthetic polynucleotide"

SEQ ID NO: 4729 - DNA, 495 bp, Artificial Sequence; identical to SEQ ID NO: 2449
  source: /note="Description of Artificial Sequence: Synthetic polynucleotide"

SEQ ID NO: 4730 - DNA, 495 bp, Artificial Sequence; identical to SEQ ID NO: 2450
  source: /note="Description of Artificial Sequence: Synthetic polynucleotide"

SEQ ID NO: 4731 - DNA, 495 bp, Artificial Sequence; identical to SEQ ID NO: 2451
  source: /note="Description of Artificial Sequence: Synthetic polynucleotide"

SEQ ID NO: 4732 - DNA, 495 bp, Artificial Sequence; identical to SEQ ID NO: 2452
  source: /note="Description of Artificial Sequence: Synthetic polynucleotide"

SEQ ID NO: 4733 - DNA, 495 bp, Artificial Sequence; identical to SEQ ID NO: 2453
  source: /note="Description of Artificial Sequence: Synthetic polynucleotide"

SEQ ID NO: 4734 - DNA, 495 bp, Artificial Sequence; identical to SEQ ID NO: 2454
  source: /note="Description of Artificial Sequence: Synthetic polynucleotide"

SEQ ID NO: 4735 - DNA, 495 bp, Artificial Sequence; identical to SEQ ID NO: 2455
  source: /note="Description of Artificial Sequence: Synthetic polynucleotide"

SEQ ID NO: 4736 - DNA, 495 bp, Artificial Sequence; identical to SEQ ID NO: 2456
  source: /note="Description of Artificial Sequence: Synthetic polynucleotide"

SEQ ID NO: 4737 - DNA, 495 bp, Artificial Sequence; identical to SEQ ID NO: 2457
  source: /note="Description of Artificial Sequence: Synthetic polynucleotide"

SEQ ID NO: 4738 - DNA, 495 bp, Artificial Sequence; identical to SEQ ID NO: 2458
  source: /note="Description of Artificial Sequence: Synthetic polynucleotide"

SEQ ID NO: 4739 - DNA, 495 bp, Artificial Sequence; identical to SEQ ID NO: 2459
  source: /note="Description of Artificial Sequence: Synthetic polynucleotide"

SEQ ID NO: 4740 - DNA, 495 bp, Artificial Sequence; identical to SEQ ID NO: 2460
  source: /note="Description of Artificial Sequence: Synthetic polynucleotide"

SEQ ID NO: 4741 - DNA, 495 bp, Artificial Sequence; identical to SEQ ID NO: 2461
  source: /note="Description of Artificial Sequence: Synthetic polynucleotide"

SEQ ID NO: 4742 - DNA, 495 bp, Artificial Sequence; identical to SEQ ID NO: 2462
  source: /note="Description of Artificial Sequence: Synthetic polynucleotide"

SEQ ID NO: 4743 - DNA, 495 bp, Artificial Sequence; identical to SEQ ID NO: 2463
  source: /note="Description of Artificial Sequence: Synthetic polynucleotide"

SEQ ID NO: 4744 - DNA, 495 bp, Artificial Sequence; identical to SEQ ID NO: 2464
  source: /note="Description of Artificial Sequence: Synthetic polynucleotide"

SEQ ID NO: 4745 - DNA, 495 bp, Artificial Sequence; identical to SEQ ID NO: 2465
  source: /note="Description of Artificial Sequence: Synthetic polynucleotide"

SEQ ID NO: 4746 - DNA, 495 bp, Artificial Sequence; identical to SEQ ID NO: 2466
  source: /note="Description of Artificial Sequence: Synthetic polynucleotide"

SEQ ID NO: 4747 - DNA, 495 bp, Artificial Sequence; identical to SEQ ID NO: 2467
  source: /note="Description of Artificial Sequence: Synthetic polynucleotide"

SEQ ID NO: 4748 - DNA, 495 bp, Artificial Sequence; identical to SEQ ID NO: 2468
  source: /note="Description of Artificial Sequence: Synthetic polynucleotide"

SEQ ID NO: 4749 - DNA, 495 bp, Artificial Sequence; identical to SEQ ID NO: 2469
  source: /note="Description of Artificial Sequence: Synthetic polynucleotide"

SEQ ID NO: 4750 - DNA, 495 bp, Artificial Sequence; identical to SEQ ID NO: 2470
  source: /note="Description of Artificial Sequence: Synthetic polynucleotide"

SEQ ID NO: 4751 - DNA, 495 bp, Artificial Sequence; identical to SEQ ID NO: 2471
  source: /note="Description of Artificial Sequence: Synthetic polynucleotide"

SEQ ID NO: 4752 - DNA, 495 bp, Artificial Sequence; identical to SEQ ID NO: 2472
  source: /note="Description of Artificial Sequence: Synthetic polynucleotide"

SEQ ID NO: 4753 - DNA, 495 bp, Artificial Sequence; identical to SEQ ID NO: 2473
  source: /note="Description of Artificial Sequence: Synthetic polynucleotide"

SEQ ID NO: 4754 - DNA, 495 bp, Artificial Sequence; identical to SEQ ID NO: 2474
  source: /note="Description of Artificial Sequence: Synthetic polynucleotide"

SEQ ID NO: 4755 - DNA, 495 bp, Artificial Sequence; identical to SEQ ID NO: 2475
  source: /note="Description of Artificial Sequence: Synthetic polynucleotide"

SEQ ID NO: 4756 - DNA, 495 bp, Artificial Sequence; identical to SEQ ID NO: 2476
  source: /note="Description of Artificial Sequence: Synthetic polynucleotide"

SEQ ID NO: 4757 - DNA, 495 bp, Artificial Sequence; identical to SEQ ID NO: 2477
  source: /note="Description of Artificial Sequence: Synthetic polynucleotide"

SEQ ID NO: 4758 - DNA, 495 bp, Artificial Sequence; identical to SEQ ID NO: 2478
  source: /note="Description of Artificial Sequence: Synthetic polynucleotide"

SEQ ID NO: 4759 - DNA, 495 bp, Artificial Sequence; identical to SEQ ID NO: 2479
  source: /note="Description of Artificial Sequence: Synthetic polynucleotide"

SEQ ID NO: 4760 - DNA, 495 bp, Artificial Sequence; identical to SEQ ID NO: 2480
  source: /note="Description of Artificial Sequence: Synthetic polynucleotide"

SEQ ID NO: 4761 - DNA, 495 bp, Artificial Sequence; identical to SEQ ID NO: 2481
  source: /note="Description of Artificial Sequence: Synthetic polynucleotide"

SEQ ID NO: 4762 - DNA, 495 bp, Artificial Sequence; identical to SEQ ID NO: 2482
  source: /note="Description of Artificial Sequence: Synthetic polynucleotide"

SEQ ID NO: 4763 - DNA, 495 bp, Artificial Sequence; identical to SEQ ID NO: 2483
  source: /note="Description of Artificial Sequence: Synthetic polynucleotide"

SEQ ID NO: 4764 - DNA, 495 bp, Artificial Sequence; identical to SEQ ID NO: 2484
  source: /note="Description of Artificial Sequence: Synthetic polynucleotide"

SEQ ID NO: 4765 - DNA, 495 bp, Artificial Sequence; identical to SEQ ID NO: 2485
  source: /note="Description of Artificial Sequence: Synthetic polynucleotide"

SEQ ID NO: 4766 - DNA, 495 bp, Artificial Sequence; identical to SEQ ID NO: 2486
  source: /note="Description of Artificial Sequence: Synthetic polynucleotide"

SEQ ID NO: 4767 - DNA, 495 bp, Artificial Sequence; identical to SEQ ID NO: 2487
  source: /note="Description of Artificial Sequence: Synthetic polynucleotide"

SEQ ID NO: 4768 - DNA, 495 bp, Artificial Sequence; identical to SEQ ID NO: 2488
  source: /note="Description of Artificial Sequence: Synthetic polynucleotide"

SEQ ID NO: 4769 - DNA, 495 bp, Artificial Sequence; identical to SEQ ID NO: 2489
  source: /note="Description of Artificial Sequence: Synthetic polynucleotide"

SEQ ID NO: 4770 - DNA, 495 bp, Artificial Sequence; identical to SEQ ID NO: 2490
  source: /note="Description of Artificial Sequence: Synthetic polynucleotide"

SEQ ID NO: 4771 - DNA, 495 bp, Artificial Sequence; identical to SEQ ID NO: 2491
  source: /note="Description of Artificial Sequence: Synthetic polynucleotide"

SEQ ID NO: 4772 - DNA, 495 bp, Artificial Sequence; identical to SEQ ID NO: 2492
  source: /note="Description of Artificial Sequence: Synthetic polynucleotide"

SEQ ID NO: 4773 - DNA, 495 bp, Artificial Sequence; identical to SEQ ID NO: 2493
  source: /note="Description of Artificial Sequence: Synthetic polynucleotide"

SEQ ID NO: 4774 - DNA, 495 bp, Artificial Sequence; identical to SEQ ID NO: 2494
  source: /note="Description of Artificial Sequence: Synthetic polynucleotide"

SEQ ID NO: 4775 - DNA, 495 bp, Artificial Sequence; identical to SEQ ID NO: 2495
  source: /note="Description of Artificial Sequence: Synthetic polynucleotide"

SEQ ID NO: 4776 - DNA, 495 bp, Artificial Sequence; identical to SEQ ID NO: 2496
  source: /note="Description of Artificial Sequence: Synthetic polynucleotide"

SEQ ID NO: 4777 - DNA, 495 bp, Artificial Sequence; identical to SEQ ID NO: 2497
  source: /note="Description of Artificial Sequence: Synthetic polynucleotide"

SEQ ID NO: 4778 - DNA, 495 bp, Artificial Sequence; identical to SEQ ID NO: 2498
  source: /note="Description of Artificial Sequence: Synthetic polynucleotide"

SEQ ID NO: 4779 - DNA, 495 bp, Artificial Sequence; identical to SEQ ID NO: 2499
  source: /note="Description of Artificial Sequence: Synthetic polynucleotide"

SEQ ID NO: 4780 - DNA, 495 bp, Artificial Sequence; identical to SEQ ID NO: 2500
  source: /note="Description of Artificial Sequence: Synthetic polynucleotide"

SEQ ID NO: 4781 - DNA, 495 bp, Artificial Sequence; identical to SEQ ID NO: 2501
  source: /note="Description of Artificial Sequence: Synthetic polynucleotide"

SEQ ID NO: 4782 - DNA, 495 bp, Artificial Sequence; identical to SEQ ID NO: 2502
  source: /note="Description of Artificial Sequence: Synthetic polynucleotide"

SEQ ID NO: 4783 - DNA, 495 bp, Artificial Sequence; identical to SEQ ID NO: 2503
  source: /note="Description of Artificial Sequence: Synthetic polynucleotide"

SEQ ID NO: 4784 - DNA, 495 bp, Artificial Sequence; identical to SEQ ID NO: 2504
  source: /note="Description of Artificial Sequence: Synthetic polynucleotide"

SEQ ID NO: 4785 - DNA, 495 bp, Artificial Sequence; identical to SEQ ID NO: 2505
  source: /note="Description of Artificial Sequence: Synthetic polynucleotide"

SEQ ID NO: 4786 - DNA, 495 bp, Artificial Sequence; identical to SEQ ID NO: 2506
  source: /note="Description of Artificial Sequence: Synthetic polynucleotide"

SEQ ID NO: 4787 - DNA, 495 bp, Artificial Sequence; identical to SEQ ID NO: 2507
  source: /note="Description of Artificial Sequence: Synthetic polynucleotide"

SEQ ID NO: 4788 - DNA, 495 bp, Artificial Sequence; identical to SEQ ID NO: 2508
  source: /note="Description of Artificial Sequence: Synthetic polynucleotide"

SEQ ID NO: 4789 - DNA, 495 bp, Artificial Sequence; identical to SEQ ID NO: 2509
  source: /note="Description of Artificial Sequence: Synthetic polynucleotide"

SEQ ID NO: 4790 - DNA, 495 bp, Artificial Sequence; identical to SEQ ID NO: 2510
  source: /note="Description of Artificial Sequence: Synthetic polynucleotide"

SEQ ID NO: 4791 - DNA, 495 bp, Artificial Sequence; identical to SEQ ID NO: 2511
  source: /note="Description of Artificial Sequence: Synthetic polynucleotide"

SEQ ID NO: 4792 - DNA, 495 bp, Artificial Sequence; identical to SEQ ID NO: 2512
  source: /note="Description of Artificial Sequence: Synthetic polynucleotide"

SEQ ID NO: 4793 - DNA, 495 bp, Artificial Sequence; identical to SEQ ID NO: 2513
  source: /note="Description of Artificial Sequence: Synthetic polynucleotide"

SEQ ID NO: 4794 - DNA, 495 bp, Artificial Sequence; identical to SEQ ID NO: 2514
  source: /note="Description of Artificial Sequence: Synthetic polynucleotide"

SEQ ID NO: 4795 - DNA, 495 bp, Artificial Sequence; identical to SEQ ID NO: 2515
  source: /note="Description of Artificial Sequence: Synthetic polynucleotide"

SEQ ID NO: 4796 - DNA, 495 bp, Artificial Sequence; identical to SEQ ID NO: 2516
  source: /note="Description of Artificial Sequence: Synthetic polynucleotide"

SEQ ID NO: 4797 - DNA, 495 bp, Artificial Sequence; identical to SEQ ID NO: 2517
  source: /note="Description of Artificial Sequence: Synthetic polynucleotide"

SEQ ID NO: 4798 - DNA, 495 bp, Artificial Sequence; identical to SEQ ID NO: 2518
  source: /note="Description of Artificial Sequence: Synthetic polynucleotide"

SEQ ID NO: 4799 - DNA, 495 bp, Artificial Sequence; identical to SEQ ID NO: 2519
  source: /note="Description of Artificial Sequence: Synthetic polynucleotide"

SEQ ID NO: 4800 - DNA, 495 bp, Artificial Sequence; identical to SEQ ID NO: 2520
  source: /note="Description of Artificial Sequence: Synthetic polynucleotide"

SEQ ID NO: 4801 - DNA, 495 bp, Artificial Sequence; identical to SEQ ID NO: 2521
  source: /note="Description of Artificial Sequence: Synthetic polynucleotide"

SEQ ID NO: 4802 - DNA, 495 bp, Artificial Sequence; identical to SEQ ID NO: 2522
  source: /note="Description of Artificial Sequence: Synthetic polynucleotide"

SEQ ID NO: 4803 - DNA, 495 bp, Artificial Sequence; identical to SEQ ID NO: 2523
  source: /note="Description of Artificial Sequence: Synthetic polynucleotide"

SEQ ID NO: 4804 - DNA, 495 bp, Artificial Sequence; identical to SEQ ID NO: 2524
  source: /note="Description of Artificial Sequence: Synthetic polynucleotide"

SEQ ID NO: 4805 - DNA, 495 bp, Artificial Sequence; identical to SEQ ID NO: 2525
  source: /note="Description of Artificial Sequence: Synthetic polynucleotide"

SEQ ID NO: 4806 - DNA, 495 bp, Artificial Sequence; identical to SEQ ID NO: 2526
  source: /note="Description of Artificial Sequence: Synthetic polynucleotide"

SEQ ID NO: 4807 - DNA, 495 bp, Artificial Sequence; identical to SEQ ID NO: 2527
  source: /note="Description of Artificial Sequence: Synthetic polynucleotide"

SEQ ID NO: 4808 - DNA, 495 bp, Artificial Sequence; identical to SEQ ID NO: 2528
  source: /note="Description of Artificial Sequence: Synthetic polynucleotide"

SEQ ID NO: 4809 - DNA, 495 bp, Artificial Sequence; identical to SEQ ID NO: 2529
  source: /note="Description of Artificial Sequence: Synthetic polynucleotide"

SEQ ID NO: 4810 - DNA, 495 bp, Artificial Sequence; identical to SEQ ID NO: 2530
  source: /note="Description of Artificial Sequence: Synthetic polynucleotide"

SEQ ID NO: 4811 - DNA, 495 bp, Artificial Sequence; identical to SEQ ID NO: 2531
  source: /note="Description of Artificial Sequence: Synthetic polynucleotide"

SEQ ID NO: 4812 - DNA, 495 bp, Artificial Sequence; identical to SEQ ID NO: 2532
  source: /note="Description of Artificial Sequence: Synthetic polynucleotide"

SEQ ID NO: 4813 - DNA, 495 bp, Artificial Sequence; identical to SEQ ID NO: 2533
  source: /note="Description of Artificial Sequence: Synthetic polynucleotide"

SEQ ID NO: 4814 - DNA, 495 bp, Artificial Sequence; identical to SEQ ID NO: 2534
  source: /note="Description of Artificial Sequence: Synthetic polynucleotide"

SEQ ID NO: 4815 - DNA, 495 bp, Artificial Sequence; identical to SEQ ID NO: 2535
  source: /note="Description of Artificial Sequence: Synthetic polynucleotide"

SEQ ID NO: 4816 - DNA, 495 bp, Artificial Sequence; identical to SEQ ID NO: 2536
  source: /note="Description of Artificial Sequence: Synthetic polynucleotide"

SEQ ID NO: 4817 - DNA, 495 bp, Artificial Sequence; identical to SEQ ID NO: 2537
  source: /note="Description of Artificial Sequence: Synthetic polynucleotide"

SEQ ID NO: 4818 - DNA, 495 bp, Artificial Sequence; identical to SEQ ID NO: 2538
  source: /note="Description of Artificial Sequence: Synthetic polynucleotide"

SEQ ID NO: 4819 - DNA, 495 bp, Artificial Sequence; identical to SEQ ID NO: 2539
  source: /note="Description of Artificial Sequence: Synthetic polynucleotide"

SEQ ID NO: 4820 - DNA, 495 bp, Artificial Sequence; identical to SEQ ID NO: 2540
  source: /note="Description of Artificial Sequence: Synthetic polynucleotide"

SEQ ID NO: 4821 - DNA, 495 bp, Artificial Sequence; identical to SEQ ID NO: 2541
  source: /note="Description of Artificial Sequence: Synthetic polynucleotide"

SEQ ID NO: 4822 - DNA, 495 bp, Artificial Sequence; identical to SEQ ID NO: 2542
  source: /note="Description of Artificial Sequence: Synthetic polynucleotide"

SEQ ID NO: 4823 - DNA, 495 bp, Artificial Sequence; identical to SEQ ID NO: 2543
  source: /note="Description of Artificial Sequence: Synthetic polynucleotide"

SEQ ID NO: 4824 - DNA, 495 bp, Artificial Sequence; identical to SEQ ID NO: 2544
  source: /note="Description of Artificial Sequence: Synthetic polynucleotide"

SEQ ID NO: 4825 - DNA, 495 bp, Artificial Sequence; identical to SEQ ID NO: 2545
  source: /note="Description of Artificial Sequence: Synthetic polynucleotide"

SEQ ID NO: 4826 - DNA, 495 bp, Artificial Sequence; identical to SEQ ID NO: 2546
  source: /note="Description of Artificial Sequence: Synthetic polynucleotide"

SEQ ID NO: 4827 - DNA, 448 bp, Artificial Sequence; identical to SEQ ID NO: 2547
  source: /note="Description of Artificial Sequence: Synthetic polynucleotide"

SEQ ID NO: 4828 - DNA, 495 bp, Artificial Sequence; identical to SEQ ID NO: 2548
  source: /note="Description of Artificial Sequence: Synthetic polynucleotide"

SEQ ID NO: 4829 - DNA, 495 bp, Artificial Sequence; identical to SEQ ID NO: 2549
  source: /note="Description of Artificial Sequence: Synthetic polynucleotide"

SEQ ID NO: 4830 - DNA, 495 bp, Artificial Sequence; identical to SEQ ID NO: 2550
  source: /note="Description of Artificial Sequence: Synthetic polynucleotide"

SEQ ID NO: 4831 - DNA, 495 bp, Artificial Sequence; identical to SEQ ID NO: 2551
  source: /note="Description of Artificial Sequence: Synthetic polynucleotide"

SEQ ID NO: 4832 - DNA, 495 bp, Artificial Sequence; identical to SEQ ID NO: 2552
  source: /note="Description of Artificial Sequence: Synthetic polynucleotide"

SEQ ID NO: 4833 - DNA, 495 bp, Artificial Sequence; identical to SEQ ID NO: 2553
  source: /note="Description of Artificial Sequence: Synthetic polynucleotide"

SEQ ID NO: 4834 - DNA, 495 bp, Artificial Sequence; identical to SEQ ID NO: 2554
  source: /note="Description of Artificial Sequence: Synthetic polynucleotide"

SEQ ID NO: 4835 - DNA, 495 bp, Artificial Sequence; identical to SEQ ID NO: 2555
  source: /note="Description of Artificial Sequence: Synthetic polynucleotide"

SEQ ID NO: 4836 - DNA, 495 bp, Artificial Sequence; identical to SEQ ID NO: 2556
  source: /note="Description of Artificial Sequence: Synthetic polynucleotide"

SEQ ID NO: 4837 - DNA, 495 bp, Artificial Sequence; identical to SEQ ID NO: 2557
  source: /note="Description of Artificial Sequence: Synthetic polynucleotide"

SEQ ID NO: 4838 - DNA, 495 bp, Artificial Sequence; identical to SEQ ID NO: 2558
  source: /note="Description of Artificial Sequence: Synthetic polynucleotide"

SEQ ID NO: 4839 - DNA, 495 bp, Artificial Sequence; identical to SEQ ID NO: 2559
  source: /note="Description of Artificial Sequence: Synthetic polynucleotide"

SEQ ID NO: 4840 - DNA, 495 bp, Artificial Sequence; identical to SEQ ID NO: 2560
  source: /note="Description of Artificial Sequence: Synthetic polynucleotide"

SEQ ID NO: 4841 - DNA, 495 bp, Artificial Sequence; identical to SEQ ID NO: 2561
  source: /note="Description of Artificial Sequence: Synthetic polynucleotide"

SEQ ID NO: 4842 - DNA, 495 bp, Artificial Sequence; identical to SEQ ID NO: 2562
  source: /note="Description of Artificial Sequence: Synthetic polynucleotide"

SEQ ID NO: 4843 - DNA, 495 bp, Artificial Sequence; identical to SEQ ID NO: 2563
  source: /note="Description of Artificial Sequence: Synthetic polynucleotide"

SEQ ID NO: 4844 - DNA, 495 bp, Artificial Sequence; identical to SEQ ID NO: 2564
  source: /note="Description of Artificial Sequence: Synthetic polynucleotide"

SEQ ID NO: 4845 - DNA, 495 bp, Artificial Sequence; identical to SEQ ID NO: 2565
  source: /note="Description of Artificial Sequence: Synthetic polynucleotide"

SEQ ID NO: 4846 - DNA, 495 bp, Artificial Sequence; identical to SEQ ID NO: 2566
  source: /note="Description of Artificial Sequence: Synthetic polynucleotide"

SEQ ID NO: 4847 - DNA, 495 bp, Artificial Sequence; identical to SEQ ID NO: 2567
  source: /note="Description of Artificial Sequence: Synthetic polynucleotide"

SEQ ID NO: 4848 - DNA, 495 bp, Artificial Sequence; identical to SEQ ID NO: 2568
  source: /note="Description of Artificial Sequence: Synthetic polynucleotide"

SEQ ID NO: 4849 - DNA, 495 bp, Artificial Sequence; identical to SEQ ID NO: 2569
  source: /note="Description of Artificial Sequence: Synthetic polynucleotide"

SEQ ID NO: 4850 - DNA, 495 bp, Artificial Sequence; identical to SEQ ID NO: 2570
  source: /note="Description of Artificial Sequence: Synthetic polynucleotide"

SEQ ID NO: 4851 - DNA, 495 bp, Artificial Sequence; identical to SEQ ID NO: 2571
  source: /note="Description of Artificial Sequence: Synthetic polynucleotide"

SEQ ID NO: 4852 - DNA, 495 bp, Artificial Sequence; identical to SEQ ID NO: 2572
  source: /note="Description of Artificial Sequence: Synthetic polynucleotide"

SEQ ID NO: 4853 - DNA, 495 bp, Artificial Sequence; identical to SEQ ID NO: 2573
  source: /note="Description of Artificial Sequence: Synthetic polynucleotide"

SEQ ID NO: 4854 - DNA, 495 bp, Artificial Sequence; identical to SEQ ID NO: 2574
  source: /note="Description of Artificial Sequence: Synthetic polynucleotide"

SEQ ID NO: 4855 - DNA, 495 bp, Artificial Sequence; identical to SEQ ID NO: 2575
  source: /note="Description of Artificial Sequence: Synthetic polynucleotide"

SEQ ID NO: 4856 - DNA, 495 bp, Artificial Sequence; identical to SEQ ID NO: 2576
  source: /note="Description of Artificial Sequence: Synthetic polynucleotide"

SEQ ID NO: 4857 - DNA, 495 bp, Artificial Sequence; identical to SEQ ID NO: 2577
  source: /note="Description of Artificial Sequence: Synthetic polynucleotide"

SEQ ID NO: 4858 - DNA, 495 bp, Artificial Sequence; identical to SEQ ID NO: 2578
  source: /note="Description of Artificial Sequence: Synthetic polynucleotide"

SEQ ID NO: 4859 - DNA, 495 bp, Artificial Sequence; identical to SEQ ID NO: 2579
  source: /note="Description of Artificial Sequence: Synthetic polynucleotide"

SEQ ID NO: 4860 - DNA, 495 bp, Artificial Sequence; identical to SEQ ID NO: 2580
  source: /note="Description of Artificial Sequence: Synthetic polynucleotide"

SEQ ID NO: 4861 - DNA, 495 bp, Artificial Sequence; identical to SEQ ID NO: 2581
  source: /note="Description of Artificial Sequence: Synthetic polynucleotide"

SEQ ID NO: 4862 - DNA, 495 bp, Artificial Sequence; identical to SEQ ID NO: 2582
  source: /note="Description of Artificial Sequence: Synthetic polynucleotide"

SEQ ID NO: 4863 - DNA, 495 bp, Artificial Sequence; identical to SEQ ID NO: 2583
  source: /note="Description of Artificial Sequence: Synthetic polynucleotide"

SEQ ID NO: 4864 - DNA, 495 bp, Artificial Sequence; identical to SEQ ID NO: 2584
  source: /note="Description of Artificial Sequence: Synthetic polynucleotide"

SEQ ID NO: 4865 - DNA, 495 bp, Artificial Sequence; identical to SEQ ID NO: 2585
  source: /note="Description of Artificial Sequence: Synthetic polynucleotide"

SEQ ID NO: 4866 - DNA, 495 bp, Artificial Sequence; identical to SEQ ID NO: 2586
  source: /note="Description of Artificial Sequence: Synthetic polynucleotide"

SEQ ID NO: 4867 - DNA, 495 bp, Artificial Sequence; identical to SEQ ID NO: 2587
  source: /note="Description of Artificial Sequence: Synthetic polynucleotide"

SEQ ID NO: 4868 - DNA, 495 bp, Artificial Sequence; identical to SEQ ID NO: 2588
  source: /note="Description of Artificial Sequence: Synthetic polynucleotide"

SEQ ID NO: 4869 - DNA, 495 bp, Artificial Sequence; identical to SEQ ID NO: 2589
  source: /note="Description of Artificial Sequence: Synthetic polynucleotide"

SEQ ID NO: 4870 - DNA, 495 bp, Artificial Sequence; identical to SEQ ID NO: 2590
  source: /note="Description of Artificial Sequence: Synthetic polynucleotide"

SEQ ID NO: 4871 - DNA, 495 bp, Artificial Sequence; identical to SEQ ID NO: 2591
  source: /note="Description of Artificial Sequence: Synthetic polynucleotide"

SEQ ID NO: 4872 - DNA, 495 bp, Artificial Sequence; identical to SEQ ID NO: 2592
  source: /note="Description of Artificial Sequence: Synthetic polynucleotide"

SEQ ID NO: 4873 - DNA, 495 bp, Artificial Sequence; identical to SEQ ID NO: 2593
  source: /note="Description of Artificial Sequence: Synthetic polynucleotide"

SEQ ID NO: 4874 - DNA, 495 bp, Artificial Sequence; identical to SEQ ID NO: 2594
  source: /note="Description of Artificial Sequence: Synthetic polynucleotide"

SEQ ID NO: 4875 - DNA, 495 bp, Artificial Sequence; identical to SEQ ID NO: 2595
  source: /note="Description of Artificial Sequence: Synthetic polynucleotide"

SEQ ID NO: 4876 - DNA, 495 bp, Artificial Sequence; identical to SEQ ID NO: 2596
  source: /note="Description of Artificial Sequence: Synthetic polynucleotide"

SEQ ID NO: 4877 - DNA, 495 bp, Artificial Sequence; identical to SEQ ID NO: 2597
  source: /note="Description of Artificial Sequence: Synthetic polynucleotide"

SEQ ID NO: 4878 - DNA, 495 bp, Artificial Sequence; identical to SEQ ID NO: 2598
  source: /note="Description of Artificial Sequence: Synthetic polynucleotide"

SEQ ID NO: 4879 - DNA, 495 bp, Artificial Sequence; identical to SEQ ID NO: 2599
  source: /note="Description of Artificial Sequence: Synthetic polynucleotide"

SEQ ID NO: 4880 - DNA, 495 bp, Artificial Sequence; identical to SEQ ID NO: 2600
  source: /note="Description of Artificial Sequence: Synthetic polynucleotide"

SEQ ID NO: 4881 - DNA, 495 bp, Artificial Sequence; identical to SEQ ID NO: 2601
  source: /note="Description of Artificial Sequence: Synthetic polynucleotide"

SEQ ID NO: 4882 - DNA, 495 bp, Artificial Sequence; identical to SEQ ID NO: 2602
  source: /note="Description of Artificial Sequence: Synthetic polynucleotide"

SEQ ID NO: 4883 - DNA, 495 bp, Artificial Sequence; identical to SEQ ID NO: 2603
  source: /note="Description of Artificial Sequence: Synthetic polynucleotide"

SEQ ID NO: 4884 - DNA, 495 bp, Artificial Sequence; identical to SEQ ID NO: 2604
  source: /note="Description of Artificial Sequence: Synthetic polynucleotide"

SEQ ID NO: 4885 - DNA, 495 bp, Artificial Sequence; identical to SEQ ID NO: 2605
  source: /note="Description of Artificial Sequence: Synthetic polynucleotide"

SEQ ID NO: 4886 - DNA, 495 bp, Artificial Sequence; identical to SEQ ID NO: 2606
  source: /note="Description of Artificial Sequence: Synthetic polynucleotide"

SEQ ID NO: 4887 - DNA, 495 bp, Artificial Sequence; identical to SEQ ID NO: 2607
  source: /note="Description of Artificial Sequence: Synthetic polynucleotide"

SEQ ID NO: 4888 - DNA, 495 bp, Artificial Sequence; identical to SEQ ID NO: 2608
  source: /note="Description of Artificial Sequence: Synthetic polynucleotide"

SEQ ID NO: 4889 - DNA, 495 bp, Artificial Sequence; identical to SEQ ID NO: 2609
  source: /note="Description of Artificial Sequence: Synthetic polynucleotide"

SEQ ID NO: 4890 - DNA, 495 bp, Artificial Sequence; identical to SEQ ID NO: 2610
  source: /note="Description of Artificial Sequence: Synthetic polynucleotide"

SEQ ID NO: 4891 - DNA, 495 bp, Artificial Sequence; identical to SEQ ID NO: 2611
  source: /note="Description of Artificial Sequence: Synthetic polynucleotide"

SEQ ID NO: 4892 - DNA, 495 bp, Artificial Sequence; identical to SEQ ID NO: 2612
  source: /note="Description of Artificial Sequence: Synthetic polynucleotide"

SEQ ID NO: 4893 - DNA, 495 bp, Artificial Sequence; identical to SEQ ID NO: 2613
  source: /note="Description of Artificial Sequence: Synthetic polynucleotide"

SEQ ID NO: 4894 - DNA, 495 bp, Artificial Sequence; identical to SEQ ID NO: 2614
  source: /note="Description of Artificial Sequence: Synthetic polynucleotide"

SEQ ID NO: 4895 - DNA, 495 bp, Artificial Sequence; identical to SEQ ID NO: 2615
  source: /note="Description of Artificial Sequence: Synthetic polynucleotide"

SEQ ID NO: 4896 - DNA, 495 bp, Artificial Sequence; identical to SEQ ID NO: 2616
  source: /note="Description of Artificial Sequence: Synthetic polynucleotide"

SEQ ID NO: 4897 - DNA, 495 bp, Artificial Sequence; identical to SEQ ID NO: 2617
  source: /note="Description of Artificial Sequence: Synthetic polynucleotide"

SEQ ID NO: 4898 - DNA, 495 bp, Artificial Sequence; identical to SEQ ID NO: 2618
  source: /note="Description of Artificial Sequence: Synthetic polynucleotide"

SEQ ID NO: 4899 - DNA, 495 bp, Artificial Sequence; identical to SEQ ID NO: 2619
  source: /note="Description of Artificial Sequence: Synthetic polynucleotide"

SEQ ID NO: 4900 - DNA, 495 bp, Artificial Sequence; identical to SEQ ID NO: 2620
  source: /note="Description of Artificial Sequence: Synthetic polynucleotide"

SEQ ID NO: 4901 - DNA, 495 bp, Artificial Sequence; identical to SEQ ID NO: 2621
  source: /note="Description of Artificial Sequence: Synthetic polynucleotide"

SEQ ID NO: 4902 - DNA, 495 bp, Artificial Sequence; identical to SEQ ID NO: 2622
  source: /note="Description of Artificial Sequence: Synthetic polynucleotide"

SEQ ID NO: 4903 - DNA, 495 bp, Artificial Sequence; identical to SEQ ID NO: 2623
  source: /note="Description of Artificial Sequence: Synthetic polynucleotide"

SEQ ID NO: 4904 - DNA, 495 bp, Artificial Sequence; identical to SEQ ID NO: 2624
  source: /note="Description of Artificial Sequence: Synthetic polynucleotide"

SEQ ID NO: 4905 - DNA, 495 bp, Artificial Sequence; identical to SEQ ID NO: 2625
  source: /note="Description of Artificial Sequence: Synthetic polynucleotide"

SEQ ID NO: 4906 - DNA, 495 bp, Artificial Sequence; identical to SEQ ID NO: 2626
  source: /note="Description of Artificial Sequence: Synthetic polynucleotide"

SEQ ID NO: 4907 - DNA, 495 bp, Artificial Sequence; identical to SEQ ID NO: 2627
  source: /note="Description of Artificial Sequence: Synthetic polynucleotide"

SEQ ID NO: 4908 - DNA, 495 bp, Artificial Sequence; identical to SEQ ID NO: 2628
  source: /note="Description of Artificial Sequence: Synthetic polynucleotide"

SEQ ID NO: 4909 - DNA, 495 bp, Artificial Sequence; identical to SEQ ID NO: 2629
  source: /note="Description of Artificial Sequence: Synthetic polynucleotide"

SEQ ID NO: 4910 - DNA, 495 bp, Artificial Sequence; identical to SEQ ID NO: 2630
  source: /note="Description of Artificial Sequence: Synthetic polynucleotide"

SEQ ID NO: 4911 - DNA, 495 bp, Artificial Sequence; identical to SEQ ID NO: 2631
  source: /note="Description of Artificial Sequence: Synthetic polynucleotide"

SEQ ID NO: 4912 - DNA, 495 bp, Artificial Sequence; identical to SEQ ID NO: 2632
  source: /note="Description of Artificial Sequence: Synthetic polynucleotide"

SEQ ID NO: 4913 - DNA, 495 bp, Artificial Sequence; identical to SEQ ID NO: 2633
  source: /note="Description of Artificial Sequence: Synthetic polynucleotide"

SEQ ID NO: 4914 - DNA, 495 bp, Artificial Sequence; identical to SEQ ID NO: 2634
  source: /note="Description of Artificial Sequence: Synthetic polynucleotide"

SEQ ID NO: 4915 - DNA, 495 bp, Artificial Sequence; identical to SEQ ID NO: 2635
  source: /note="Description of Artificial Sequence: Synthetic polynucleotide"

SEQ ID NO: 4916 - DNA, 495 bp, Artificial Sequence; identical to SEQ ID NO: 2636
  source: /note="Description of Artificial Sequence: Synthetic polynucleotide"

SEQ ID NO: 4917 - DNA, 495 bp, Artificial Sequence; identical to SEQ ID NO: 2637
  source: /note="Description of Artificial Sequence: Synthetic polynucleotide"

SEQ ID NO: 4918 - DNA, 495 bp, Artificial Sequence; identical to SEQ ID NO: 2638
  source: /note="Description of Artificial Sequence: Synthetic polynucleotide"

SEQ ID NO: 4919 - DNA, 495 bp, Artificial Sequence; identical to SEQ ID NO: 2639
  source: /note="Description of Artificial Sequence: Synthetic polynucleotide"

SEQ ID NO: 4920 - DNA, 495 bp, Artificial Sequence; identical to SEQ ID NO: 2640
  source: /note="Description of Artificial Sequence: Synthetic polynucleotide"

SEQ ID NO: 4921 - DNA, 495 bp, Artificial Sequence; identical to SEQ ID NO: 2641
  source: /note="Description of Artificial Sequence: Synthetic polynucleotide"

SEQ ID NO: 4922 - DNA, 495 bp, Artificial Sequence; identical to SEQ ID NO: 2642
  source: /note="Description of Artificial Sequence: Synthetic polynucleotide"

SEQ ID NO: 4923 - DNA, 495 bp, Artificial Sequence; identical to SEQ ID NO: 2643
  source: /note="Description of Artificial Sequence: Synthetic polynucleotide"

SEQ ID NO: 4924 - DNA, 495 bp, Artificial Sequence; identical to SEQ ID NO: 2644
  source: /note="Description of Artificial Sequence: Synthetic polynucleotide"

SEQ ID NO: 4925 - DNA, 495 bp, Artificial Sequence; identical to SEQ ID NO: 2645
  source: /note="Description of Artificial Sequence: Synthetic polynucleotide"

SEQ ID NO: 4926 - DNA, 495 bp, Artificial Sequence; identical to SEQ ID NO: 2646
  source: /note="Description of Artificial Sequence: Synthetic polynucleotide"

SEQ ID NO: 4927 - DNA, 495 bp, Artificial Sequence; identical to SEQ ID NO: 2647
  source: /note="Description of Artificial Sequence: Synthetic polynucleotide"

SEQ ID NO: 4928 - DNA, 495 bp, Artificial Sequence; identical to SEQ ID NO: 2648
  source: /note="Description of Artificial Sequence: Synthetic polynucleotide"

SEQ ID NO: 4929 - DNA, 495 bp, Artificial Sequence; identical to SEQ ID NO: 2649
  source: /note="Description of Artificial Sequence: Synthetic polynucleotide"

SEQ ID NO: 4930 - DNA, 495 bp, Artificial Sequence; identical to SEQ ID NO: 2650
  source: /note="Description of Artificial Sequence: Synthetic polynucleotide"

SEQ ID NO: 4931 - DNA, 495 bp, Artificial Sequence; identical to SEQ ID NO: 2651
  source: /note="Description of Artificial Sequence: Synthetic polynucleotide"

SEQ ID NO: 4932 - DNA, 495 bp, Artificial Sequence; identical to SEQ ID NO: 2652
  source: /note="Description of Artificial Sequence: Synthetic polynucleotide"

SEQ ID NO: 4933 - DNA, 495 bp, Artificial Sequence; identical to SEQ ID NO: 2653
  source: /note="Description of Artificial Sequence: Synthetic polynucleotide"

SEQ ID NO: 4934 - DNA, 495 bp, Artificial Sequence; identical to SEQ ID NO: 2654
  source: /note="Description of Artificial Sequence: Synthetic polynucleotide"

SEQ ID NO: 4935 - DNA, 495 bp, Artificial Sequence; identical to SEQ ID NO: 2655
  source: /note="Description of Artificial Sequence: Synthetic polynucleotide"

SEQ ID NO: 4936 - DNA, 495 bp, Artificial Sequence; identical to SEQ ID NO: 2656
  source: /note="Description of Artificial Sequence: Synthetic polynucleotide"

SEQ ID NO: 4937 - DNA, 495 bp, Artificial Sequence; identical to SEQ ID NO: 2657
  source: /note="Description of Artificial Sequence: Synthetic polynucleotide"

SEQ ID NO: 4938 - DNA, 495 bp, Artificial Sequence; identical to SEQ ID NO: 2658
  source: /note="Description of Artificial Sequence: Synthetic polynucleotide"

SEQ ID NO: 4939 - DNA, 495 bp, Artificial Sequence; identical to SEQ ID NO: 2659
  source: /note="Description of Artificial Sequence: Synthetic polynucleotide"

SEQ ID NO: 4940 - DNA, 495 bp, Artificial Sequence; identical to SEQ ID NO: 2660
  source: /note="Description of Artificial Sequence: Synthetic polynucleotide"

SEQ ID NO: 4941 - DNA, 495 bp, Artificial Sequence; identical to SEQ ID NO: 2661
  source: /note="Description of Artificial Sequence: Synthetic polynucleotide"

SEQ ID NO: 4942 - DNA, 495 bp, Artificial Sequence; identical to SEQ ID NO: 2662
  source: /note="Description of Artificial Sequence: Synthetic polynucleotide"

SEQ ID NO: 4943 - DNA, 495 bp, Artificial Sequence; identical to SEQ ID NO: 2663
  source: /note="Description of Artificial Sequence: Synthetic polynucleotide"

SEQ ID NO: 4944 - DNA, 495 bp, Artificial Sequence; identical to SEQ ID NO: 2664
  source: /note="Description of Artificial Sequence: Synthetic polynucleotide"

SEQ ID NO: 4945 - DNA, 495 bp, Artificial Sequence; identical to SEQ ID NO: 2665
  source: /note="Description of Artificial Sequence: Synthetic polynucleotide"

SEQ ID NO: 4946 - DNA, 495 bp, Artificial Sequence; identical to SEQ ID NO: 2666
  source: /note="Description of Artificial Sequence: Synthetic polynucleotide"

SEQ ID NO: 4947 - DNA, 495 bp, Artificial Sequence; identical to SEQ ID NO: 2667
  source: /note="Description of Artificial Sequence: Synthetic polynucleotide"

SEQ ID NO: 4948 - DNA, 495 bp, Artificial Sequence; identical to SEQ ID NO: 2668
  source: /note="Description of Artificial Sequence: Synthetic polynucleotide"

SEQ ID NO: 4949 - DNA, 495 bp, Artificial Sequence; identical to SEQ ID NO: 2669
  source: /note="Description of Artificial Sequence: Synthetic polynucleotide"

SEQ ID NO: 4950 - DNA, 495 bp, Artificial Sequence; identical to SEQ ID NO: 2670
  source: /note="Description of Artificial Sequence: Synthetic polynucleotide"

SEQ ID NO: 4951 - DNA, 448 bp, Artificial Sequence; identical to SEQ ID NO: 2671
  source: /note="Description of Artificial Sequence: Synthetic polynucleotide"

SEQ ID NO: 4952 - DNA, 495 bp, Artificial Sequence; identical to SEQ ID NO: 2672
  source: /note="Description of Artificial Sequence: Synthetic polynucleotide"

SEQ ID NO: 4953 - DNA, 495 bp, Artificial Sequence; identical to SEQ ID NO: 2673
  source: /note="Description of Artificial Sequence: Synthetic polynucleotide"

SEQ ID NO: 4954 - DNA, 495 bp, Artificial Sequence; identical to SEQ ID NO: 2674
  source: /note="Description of Artificial Sequence: Synthetic polynucleotide"

SEQ ID NO: 4955 - DNA, 495 bp, Artificial Sequence; identical to SEQ ID NO: 2675
  source: /note="Description of Artificial Sequence: Synthetic polynucleotide"

SEQ ID NO: 4956 - DNA, 495 bp, Artificial Sequence; identical to SEQ ID NO: 2676
  source: /note="Description of Artificial Sequence: Synthetic polynucleotide"

SEQ ID NO: 4957 - DNA, 495 bp, Artificial Sequence; identical to SEQ ID NO: 2677
  source: /note="Description of Artificial Sequence: Synthetic polynucleotide"

SEQ ID NO: 4958 - DNA, 495 bp, Artificial Sequence; identical to SEQ ID NO: 2678
  source: /note="Description of Artificial Sequence: Synthetic polynucleotide"

SEQ ID NO: 4959 - DNA, 495 bp, Artificial Sequence; identical to SEQ ID NO: 2679
  source: /note="Description of Artificial Sequence: Synthetic polynucleotide"

SEQ ID NO: 4960 - DNA, 495 bp, Artificial Sequence; identical to SEQ ID NO: 2680
  source: /note="Description of Artificial Sequence: Synthetic polynucleotide"

SEQ ID NO: 4961 - DNA, 495 bp, Artificial Sequence; identical to SEQ ID NO: 2681
  source: /note="Description of Artificial Sequence: Synthetic polynucleotide"

SEQ ID NO: 4962 - DNA, 495 bp, Artificial Sequence; identical to SEQ ID NO: 2682
  source: /note="Description of Artificial Sequence: Synthetic polynucleotide"

SEQ ID NO: 4963 - DNA, 495 bp, Artificial Sequence; identical to SEQ ID NO: 2683
  source: /note="Description of Artificial Sequence: Synthetic polynucleotide"

SEQ ID NO: 4964 - DNA, 495 bp, Artificial Sequence; identical to SEQ ID NO: 2684
  source: /note="Description of Artificial Sequence: Synthetic polynucleotide"

SEQ ID NO: 4965 - DNA, 495 bp, Artificial Sequence; identical to SEQ ID NO: 2685
  source: /note="Description of Artificial Sequence: Synthetic polynucleotide"

SEQ ID NO: 4966 - DNA, 495 bp, Artificial Sequence; identical to SEQ ID NO: 2686
  source: /note="Description of Artificial Sequence: Synthetic polynucleotide"

SEQ ID NO: 4967 - DNA, 495 bp, Artificial Sequence; identical to SEQ ID NO: 2687
  source: /note="Description of Artificial Sequence: Synthetic polynucleotide"

SEQ ID NO: 4968 - DNA, 495 bp, Artificial Sequence; identical to SEQ ID NO: 2688
  source: /note="Description of Artificial Sequence: Synthetic polynucleotide"

SEQ ID NO: 4969 - DNA, 495 bp, Artificial Sequence; identical to SEQ ID NO: 2689
  source: /note="Description of Artificial Sequence: Synthetic polynucleotide"

SEQ ID NO: 4970 - DNA, 495 bp, Artificial Sequence; identical to SEQ ID NO: 2690
  source: /note="Description of Artificial Sequence: Synthetic polynucleotide"

SEQ ID NO: 4971 - DNA, 495 bp, Artificial Sequence; identical to SEQ ID NO: 2691
  source: /note="Description of Artificial Sequence: Synthetic polynucleotide"

SEQ ID NO: 4972 - DNA, 495 bp, Artificial Sequence; identical to SEQ ID NO: 2692
  source: /note="Description of Artificial Sequence: Synthetic polynucleotide"

SEQ ID NO: 4973 - DNA, 495 bp, Artificial Sequence; identical to SEQ ID NO: 2693
  source: /note="Description of Artificial Sequence: Synthetic polynucleotide"

SEQ ID NO: 4974 - DNA, 495 bp, Artificial Sequence; identical to SEQ ID NO: 2694
  source: /note="Description of Artificial Sequence: Synthetic polynucleotide"

SEQ ID NO: 4975 - DNA, 495 bp, Artificial Sequence; identical to SEQ ID NO: 2695
  source: /note="Description of Artificial Sequence: Synthetic polynucleotide"

SEQ ID NO: 4976 - DNA, 495 bp, Artificial Sequence; identical to SEQ ID NO: 2696
  source: /note="Description of Artificial Sequence: Synthetic polynucleotide"

SEQ ID NO: 4977 - DNA, 495 bp, Artificial Sequence; identical to SEQ ID NO: 2697
  source: /note="Description of Artificial Sequence: Synthetic polynucleotide"

SEQ ID NO: 4978 - DNA, 495 bp, Artificial Sequence; identical to SEQ ID NO: 2698
  source: /note="Description of Artificial Sequence: Synthetic polynucleotide"

SEQ ID NO: 4979 - DNA, 495 bp, Artificial Sequence; identical to SEQ ID NO: 2699
  source: /note="Description of Artificial Sequence: Synthetic polynucleotide"

SEQ ID NO: 4980 - DNA, 495 bp, Artificial Sequence; identical to SEQ ID NO: 2700
  source: /note="Description of Artificial Sequence: Synthetic polynucleotide"

SEQ ID NO: 4981 - DNA, 495 bp, Artificial Sequence; identical to SEQ ID NO: 2701
  source: /note="Description of Artificial Sequence: Synthetic polynucleotide"

SEQ ID NO: 4982 - DNA, 495 bp, Artificial Sequence; identical to SEQ ID NO: 2702
  source: /note="Description of Artificial Sequence: Synthetic polynucleotide"

SEQ ID NO: 4983 - DNA, 495 bp, Artificial Sequence; identical to SEQ ID NO: 2703
  source: /note="Description of Artificial Sequence: Synthetic polynucleotide"

SEQ ID NO: 4984 - DNA, 495 bp, Artificial Sequence; identical to SEQ ID NO: 2704
  source: /note="Description of Artificial Sequence: Synthetic polynucleotide"

SEQ ID NO: 4985 - DNA, 495 bp, Artificial Sequence; identical to SEQ ID NO: 2705
  source: /note="Description of Artificial Sequence: Synthetic polynucleotide"

SEQ ID NO: 4986 - DNA, 495 bp, Artificial Sequence; identical to SEQ ID NO: 2706
  source: /note="Description of Artificial Sequence: Synthetic polynucleotide"

SEQ ID NO: 4987 - DNA, 495 bp, Artificial Sequence; identical to SEQ ID NO: 2707
  source: /note="Description of Artificial Sequence: Synthetic polynucleotide"

SEQ ID NO: 4988 - DNA, 495 bp, Artificial Sequence; identical to SEQ ID NO: 2708
  source: /note="Description of Artificial Sequence: Synthetic polynucleotide"

SEQ ID NO: 4989 - DNA, 495 bp, Artificial Sequence; identical to SEQ ID NO: 2709
  source: /note="Description of Artificial Sequence: Synthetic polynucleotide"

SEQ ID NO: 4990 - DNA, 495 bp, Artificial Sequence; identical to SEQ ID NO: 2710
  source: /note="Description of Artificial Sequence: Synthetic polynucleotide"

SEQ ID NO: 4991 - DNA, 495 bp, Artificial Sequence; identical to SEQ ID NO: 2711
  source: /note="Description of Artificial Sequence: Synthetic polynucleotide"

SEQ ID NO: 4992 - DNA, 495 bp, Artificial Sequence; identical to SEQ ID NO: 2712
  source: /note="Description of Artificial Sequence: Synthetic polynucleotide"

SEQ ID NO: 4993 - DNA, 495 bp, Artificial Sequence; identical to SEQ ID NO: 2713
  source: /note="Description of Artificial Sequence: Synthetic polynucleotide"

SEQ ID NO: 4994 - DNA, 495 bp, Artificial Sequence; identical to SEQ ID NO: 2714
  source: /note="Description of Artificial Sequence: Synthetic polynucleotide"

SEQ ID NO: 4995 - DNA, 495 bp, Artificial Sequence; identical to SEQ ID NO: 2715
  source: /note="Description of Artificial Sequence: Synthetic polynucleotide"

SEQ ID NO: 4996 - DNA, 495 bp, Artificial Sequence; identical to SEQ ID NO: 2716
  source: /note="Description of Artificial Sequence: Synthetic polynucleotide"

SEQ ID NO: 4997 - DNA, 495 bp, Artificial Sequence; identical to SEQ ID NO: 2717
  source: /note="Description of Artificial Sequence: Synthetic polynucleotide"

SEQ ID NO: 4998 - DNA, 495 bp, Artificial Sequence; identical to SEQ ID NO: 2718
  source: /note="Description of Artificial Sequence: Synthetic polynucleotide"

SEQ ID NO: 4999 - DNA, 495 bp, Artificial Sequence; identical to SEQ ID NO: 2719
  source: /note="Description of Artificial Sequence: Synthetic polynucleotide"

SEQ ID NO: 5000 - DNA, 495 bp, Artificial Sequence; identical to SEQ ID NO: 2720
  source: /note="Description of Artificial Sequence: Synthetic polynucleotide"

SEQ ID NO: 5001 - DNA, 495 bp, Artificial Sequence; identical to SEQ ID NO: 2721
  source: /note="Description of Artificial Sequence: Synthetic polynucleotide"

SEQ ID NO: 5002 - DNA, 495 bp, Artificial Sequence; identical to SEQ ID NO: 2722
  source: /note="Description of Artificial Sequence: Synthetic polynucleotide"

SEQ ID NO: 5003 - DNA, 495 bp, Artificial Sequence; identical to SEQ ID NO: 2723
  source: /note="Description of Artificial Sequence: Synthetic polynucleotide"

SEQ ID NO: 5004 - DNA, 495 bp, Artificial Sequence; identical to SEQ ID NO: 2724
  source: /note="Description of Artificial Sequence: Synthetic polynucleotide"

SEQ ID NO: 5005 - DNA, 495 bp, Artificial Sequence; identical to SEQ ID NO: 2725
  source: /note="Description of Artificial Sequence: Synthetic polynucleotide"

SEQ ID NO: 5006 - DNA, 495 bp, Artificial Sequence; identical to SEQ ID NO: 2726
  source: /note="Description of Artificial Sequence: Synthetic polynucleotide"

SEQ ID NO: 5007 - DNA, 495 bp, Artificial Sequence; identical to SEQ ID NO: 2727
  source: /note="Description of Artificial Sequence: Synthetic polynucleotide"

SEQ ID NO: 5008 - DNA, 495 bp, Artificial Sequence; identical to SEQ ID NO: 2728
  source: /note="Description of Artificial Sequence: Synthetic polynucleotide"

SEQ ID NO: 5009 - DNA, 495 bp, Artificial Sequence; identical to SEQ ID NO: 2729
  source: /note="Description of Artificial Sequence: Synthetic polynucleotide"

SEQ ID NO: 5010 - DNA, 495 bp, Artificial Sequence; identical to SEQ ID NO: 2730
  source: /note="Description of Artificial Sequence: Synthetic polynucleotide"

SEQ ID NO: 5011 - DNA, 495 bp, Artificial Sequence; identical to SEQ ID NO: 2731
  source: /note="Description of Artificial Sequence: Synthetic polynucleotide"

SEQ ID NO: 5012 - DNA, 495 bp, Artificial Sequence; identical to SEQ ID NO: 2732
  source: /note="Description of Artificial Sequence: Synthetic polynucleotide"

SEQ ID NO: 5013 - DNA, 495 bp, Artificial Sequence; identical to SEQ ID NO: 2733
  source: /note="Description of Artificial Sequence: Synthetic polynucleotide"

SEQ ID NO: 5014 - DNA, 495 bp, Artificial Sequence; identical to SEQ ID NO: 2734
  source: /note="Description of Artificial Sequence: Synthetic polynucleotide"

SEQ ID NO: 5015 - DNA, 495 bp, Artificial Sequence; identical to SEQ ID NO: 2735
  source: /note="Description of Artificial Sequence: Synthetic polynucleotide"

SEQ ID NO: 5016 - DNA, 495 bp, Artificial Sequence; identical to SEQ ID NO: 2736
  source: /note="Description of Artificial Sequence: Synthetic polynucleotide"

SEQ ID NO: 5017 - DNA, 495 bp, Artificial Sequence; identical to SEQ ID NO: 2737
  source: /note="Description of Artificial Sequence: Synthetic polynucleotide"

SEQ ID NO: 5018 - DNA, 495 bp, Artificial Sequence; identical to SEQ ID NO: 2738
  source: /note="Description of Artificial Sequence: Synthetic polynucleotide"

SEQ ID NO: 5019 - DNA, 495 bp, Artificial Sequence; identical to SEQ ID NO: 2739
  source: /note="Description of Artificial Sequence: Synthetic polynucleotide"

SEQ ID NO: 5020 - DNA, 495 bp, Artificial Sequence; identical to SEQ ID NO: 2740
  source: /note="Description of Artificial Sequence: Synthetic polynucleotide"

SEQ ID NO: 5021 - DNA, 495 bp, Artificial Sequence; identical to SEQ ID NO: 2741
  source: /note="Description of Artificial Sequence: Synthetic polynucleotide"

SEQ ID NO: 5022 - DNA, 495 bp, Artificial Sequence; identical to SEQ ID NO: 2742
  source: /note="Description of Artificial Sequence: Synthetic polynucleotide"

SEQ ID NO: 5023 - DNA, 495 bp, Artificial Sequence; identical to SEQ ID NO: 2743
  source: /note="Description of Artificial Sequence: Synthetic polynucleotide"

SEQ ID NO: 5024 - DNA, 495 bp, Artificial Sequence; identical to SEQ ID NO: 2744
  source: /note="Description of Artificial Sequence: Synthetic polynucleotide"

SEQ ID NO: 5025 - DNA, 495 bp, Artificial Sequence; identical to SEQ ID NO: 2745
  source: /note="Description of Artificial Sequence: Synthetic polynucleotide"

SEQ ID NO: 5026 - DNA, 495 bp, Artificial Sequence; identical to SEQ ID NO: 2746
  source: /note="Description of Artificial Sequence: Synthetic polynucleotide"

SEQ ID NO: 5027 - DNA, 495 bp, Artificial Sequence; identical to SEQ ID NO: 2747
  source: /note="Description of Artificial Sequence: Synthetic polynucleotide"

SEQ ID NO: 5028 - DNA, 495 bp, Artificial Sequence; identical to SEQ ID NO: 2748
  source: /note="Description of Artificial Sequence: Synthetic polynucleotide"

SEQ ID NO: 5029 - DNA, 495 bp, Artificial Sequence; identical to SEQ ID NO: 2749
  source: /note="Description of Artificial Sequence: Synthetic polynucleotide"

SEQ ID NO: 5030 - DNA, 495 bp, Artificial Sequence; identical to SEQ ID NO: 2750
  source: /note="Description of Artificial Sequence: Synthetic polynucleotide"

SEQ ID NO: 5031 - DNA, 495 bp, Artificial Sequence; identical to SEQ ID NO: 2751
  source: /note="Description of Artificial Sequence: Synthetic polynucleotide"

SEQ ID NO: 5032 - DNA, 495 bp, Artificial Sequence; identical to SEQ ID NO: 2752
  source: /note="Description of Artificial Sequence: Synthetic polynucleotide"

SEQ ID NO: 5033 - DNA, 495 bp, Artificial Sequence; identical to SEQ ID NO: 2753
  source: /note="Description of Artificial Sequence: Synthetic polynucleotide"

SEQ ID NO: 5034 - DNA, 495 bp, Artificial Sequence; identical to SEQ ID NO: 2754
  source: /note="Description of Artificial Sequence: Synthetic polynucleotide"

SEQ ID NO: 5035 - DNA, 495 bp, Artificial Sequence; identical to SEQ ID NO: 2755
  source: /note="Description of Artificial Sequence: Synthetic polynucleotide"

SEQ ID NO: 5036 - DNA, 495 bp, Artificial Sequence; identical to SEQ ID NO: 2756
  source: /note="Description of Artificial Sequence: Synthetic polynucleotide"

SEQ ID NO: 5037 - DNA, 495 bp, Artificial Sequence; identical to SEQ ID NO: 2757
  source: /note="Description of Artificial Sequence: Synthetic polynucleotide"

SEQ ID NO: 5038 - DNA, 495 bp, Artificial Sequence; identical to SEQ ID NO: 2758
  source: /note="Description of Artificial Sequence: Synthetic polynucleotide"

SEQ ID NO: 5039 - DNA, 495 bp, Artificial Sequence; identical to SEQ ID NO: 2759
  source: /note="Description of Artificial Sequence: Synthetic polynucleotide"

SEQ ID NO: 5040 - DNA, 495 bp, Artificial Sequence; identical to SEQ ID NO: 2760
  source: /note="Description of Artificial Sequence: Synthetic polynucleotide"

SEQ ID NO: 5041 - DNA, 495 bp, Artificial Sequence; identical to SEQ ID NO: 2761
  source: /note="Description of Artificial Sequence: Synthetic polynucleotide"

SEQ ID NO: 5042 - DNA, 495 bp, Artificial Sequence; identical to SEQ ID NO: 2762
  source: /note="Description of Artificial Sequence: Synthetic polynucleotide"

SEQ ID NO: 5043 - DNA, 495 bp, Artificial Sequence; identical to SEQ ID NO: 2763
  source: /note="Description of Artificial Sequence: Synthetic polynucleotide"

SEQ ID NO: 5044 - DNA, 495 bp, Artificial Sequence; identical to SEQ ID NO: 2764
  source: /note="Description of Artificial Sequence: Synthetic polynucleotide"

SEQ ID NO: 5045 - DNA, 495 bp, Artificial Sequence; identical to SEQ ID NO: 2765
  source: /note="Description of Artificial Sequence: Synthetic polynucleotide"

SEQ ID NO: 5046 - DNA, 495 bp, Artificial Sequence; identical to SEQ ID NO: 2766
  source: /note="Description of Artificial Sequence: Synthetic polynucleotide"

SEQ ID NO: 5047 - DNA, 495 bp, Artificial Sequence; identical to SEQ ID NO: 2767
  source: /note="Description of Artificial Sequence: Synthetic polynucleotide"

SEQ ID NO: 5048 - DNA, 495 bp, Artificial Sequence; identical to SEQ ID NO: 2768
  source: /note="Description of Artificial Sequence: Synthetic polynucleotide"

SEQ ID NO: 5049 - DNA, 495 bp, Artificial Sequence; identical to SEQ ID NO: 2769
  source: /note="Description of Artificial Sequence: Synthetic polynucleotide"

SEQ ID NO: 5050 - DNA, 495 bp, Artificial Sequence; identical to SEQ ID NO: 2770
  source: /note="Description of Artificial Sequence: Synthetic polynucleotide"

SEQ ID NO: 5051 - DNA, 495 bp, Artificial Sequence; identical to SEQ ID NO: 2771
  source: /note="Description of Artificial Sequence: Synthetic polynucleotide"

SEQ ID NO: 5052 - DNA, 495 bp, Artificial Sequence; identical to SEQ ID NO: 2772
  source: /note="Description of Artificial Sequence: Synthetic polynucleotide"

SEQ ID NO: 5053 - DNA, 495 bp, Artificial Sequence; identical to SEQ ID NO: 2773
  source: /note="Description of Artificial Sequence: Synthetic polynucleotide"

SEQ ID NO: 5054 - DNA, 495 bp, Artificial Sequence; identical to SEQ ID NO: 2774
  source: /note="Description of Artificial Sequence: Synthetic polynucleotide"

SEQ ID NO: 5055 - DNA, 495 bp, Artificial Sequence; identical to SEQ ID NO: 2775
  source: /note="Description of Artificial Sequence: Synthetic polynucleotide"

SEQ ID NO: 5056 - DNA, 495 bp, Artificial Sequence; identical to SEQ ID NO: 2776
  source: /note="Description of Artificial Sequence: Synthetic polynucleotide"

SEQ ID NO: 5057 - DNA, 495 bp, Artificial Sequence; identical to SEQ ID NO: 2777
  source: /note="Description of Artificial Sequence: Synthetic polynucleotide"

SEQ ID NO: 5058 - DNA, 495 bp, Artificial Sequence; identical to SEQ ID NO: 2778
  source: /note="Description of Artificial Sequence: Synthetic polynucleotide"

SEQ ID NO: 5059 - DNA, 495 bp, Artificial Sequence; identical to SEQ ID NO: 2779
  source: /note="Description of Artificial Sequence: Synthetic polynucleotide"

SEQ ID NO: 5060 - DNA, 495 bp, Artificial Sequence; identical to SEQ ID NO: 2780
  source: /note="Description of Artificial Sequence: Synthetic polynucleotide"

SEQ ID NO: 5061 - DNA, 495 bp, Artificial Sequence; identical to SEQ ID NO: 2781
  source: /note="Description of Artificial Sequence: Synthetic polynucleotide"

SEQ ID NO: 5062 - DNA, 495 bp, Artificial Sequence; identical to SEQ ID NO: 2782
  source: /note="Description of Artificial Sequence: Synthetic polynucleotide"

SEQ ID NO: 5063 - DNA, 495 bp, Artificial Sequence; identical to SEQ ID NO: 2783
  source: /note="Description of Artificial Sequence: Synthetic polynucleotide"

SEQ ID NO: 5064 - DNA, 495 bp, Artificial Sequence; identical to SEQ ID NO: 2784
  source: /note="Description of Artificial Sequence: Synthetic polynucleotide"

SEQ ID NO: 5065 - DNA, 495 bp, Artificial Sequence; identical to SEQ ID NO: 2785
  source: /note="Description of Artificial Sequence: Synthetic polynucleotide"

SEQ ID NO: 5066 - DNA, 495 bp, Artificial Sequence; identical to SEQ ID NO: 2786
  source: /note="Description of Artificial Sequence: Synthetic polynucleotide"

SEQ ID NO: 5067 - DNA, 495 bp, Artificial Sequence; identical to SEQ ID NO: 2787
  source: /note="Description of Artificial Sequence: Synthetic polynucleotide"

SEQ ID NO: 5068 - DNA, 495 bp, Artificial Sequence; identical to SEQ ID NO: 2788
  source: /note="Description of Artificial Sequence: Synthetic polynucleotide"

SEQ ID NO: 5069 - DNA, 495 bp, Artificial Sequence; identical to SEQ ID NO: 2789
  source: /note="Description of Artificial Sequence: Synthetic polynucleotide"

SEQ ID NO: 5070 - DNA, 495 bp, Artificial Sequence; identical to SEQ ID NO: 2790
  source: /note="Description of Artificial Sequence: Synthetic polynucleotide"

SEQ ID NO: 5071 - DNA, 495 bp, Artificial Sequence; identical to SEQ ID NO: 2791
  source: /note="Description of Artificial Sequence: Synthetic polynucleotide"

SEQ ID NO: 5072 - DNA, 495 bp, Artificial Sequence; identical to SEQ ID NO: 2792
  source: /note="Description of Artificial Sequence: Synthetic polynucleotide"

SEQ ID NO: 5073 - DNA, 495 bp, Artificial Sequence; identical to SEQ ID NO: 2793
  source: /note="Description of Artificial Sequence: Synthetic polynucleotide"

SEQ ID NO: 5074 - DNA, 495 bp, Artificial Sequence; identical to SEQ ID NO: 2794
  source: /note="Description of Artificial Sequence: Synthetic polynucleotide"

SEQ ID NO: 5075 - DNA, 448 bp, Artificial Sequence; identical to SEQ ID NO: 2795
  source: /note="Description of Artificial Sequence: Synthetic polynucleotide"

SEQ ID NO: 5076 - DNA, 495 bp, Artificial Sequence; identical to SEQ ID NO: 2796
  source: /note="Description of Artificial Sequence: Synthetic polynucleotide"

SEQ ID NO: 5077 - DNA, 495 bp, Artificial Sequence; identical to SEQ ID NO: 2797
  source: /note="Description of Artificial Sequence: Synthetic polynucleotide"

SEQ ID NO: 5078 - DNA, 495 bp, Artificial Sequence; identical to SEQ ID NO: 2798
  source: /note="Description of Artificial Sequence: Synthetic polynucleotide"

SEQ ID NO: 5079 - DNA, 495 bp, Artificial Sequence; identical to SEQ ID NO: 2799
  source: /note="Description of Artificial Sequence: Synthetic polynucleotide"

SEQ ID NO: 5080 - DNA, 495 bp, Artificial Sequence; identical to SEQ ID NO: 2800
  source: /note="Description of Artificial Sequence: Synthetic polynucleotide"

SEQ ID NO: 5081 - DNA, 495 bp, Artificial Sequence; identical to SEQ ID NO: 2801
  source: /note="Description of Artificial Sequence: Synthetic polynucleotide"

SEQ ID NO: 5082 - DNA, 495 bp, Artificial Sequence; identical to SEQ ID NO: 2802
  source: /note="Description of Artificial Sequence: Synthetic polynucleotide"

SEQ ID NO: 5083 - DNA, 495 bp, Artificial Sequence; identical to SEQ ID NO: 2803
  source: /note="Description of Artificial Sequence: Synthetic polynucleotide"

SEQ ID NO: 5084 - DNA, 495 bp, Artificial Sequence; identical to SEQ ID NO: 2804
  source: /note="Description of Artificial Sequence: Synthetic polynucleotide"

SEQ ID NO: 5085 - DNA, 495 bp, Artificial Sequence; identical to SEQ ID NO: 2805
  source: /note="Description of Artificial Sequence: Synthetic polynucleotide"

SEQ ID NO: 5086 - DNA, 495 bp, Artificial Sequence; identical to SEQ ID NO: 2806
  source: /note="Description of Artificial Sequence: Synthetic polynucleotide"

SEQ ID NO: 5087 - DNA, 495 bp, Artificial Sequence; identical to SEQ ID NO: 2807
  source: /note="Description of Artificial Sequence: Synthetic polynucleotide"

SEQ ID NO: 5088 - DNA, 495 bp, Artificial Sequence; identical to SEQ ID NO: 2808
  source: /note="Description of Artificial Sequence: Synthetic polynucleotide"

SEQ ID NO: 5089 - DNA, 495 bp, Artificial Sequence; identical to SEQ ID NO: 2809
  source: /note="Description of Artificial Sequence: Synthetic polynucleotide"

SEQ ID NO: 5090 - DNA, 495 bp, Artificial Sequence; identical to SEQ ID NO: 2810
  source: /note="Description of Artificial Sequence: Synthetic polynucleotide"

SEQ ID NO: 5091 - DNA, 495 bp, Artificial Sequence; identical to SEQ ID NO: 2811
  source: /note="Description of Artificial Sequence: Synthetic polynucleotide"

SEQ ID NO: 5092 - DNA, 495 bp, Artificial Sequence; identical to SEQ ID NO: 2812
  source: /note="Description of Artificial Sequence: Synthetic polynucleotide"

SEQ ID NO: 5093 - DNA, 495 bp, Artificial Sequence; identical to SEQ ID NO: 2813
  source: /note="Description of Artificial Sequence: Synthetic polynucleotide"

SEQ ID NO: 5094 - DNA, 495 bp, Artificial Sequence; identical to SEQ ID NO: 2814
  source: /note="Description of Artificial Sequence: Synthetic polynucleotide"

SEQ ID NO: 5095 - DNA, 495 bp, Artificial Sequence; identical to SEQ ID NO: 2815
  source: /note="Description of Artificial Sequence: Synthetic polynucleotide"

SEQ ID NO: 5096 - DNA, 495 bp, Artificial Sequence; identical to SEQ ID NO: 2816
  source: /note="Description of Artificial Sequence: Synthetic polynucleotide"

SEQ ID NO: 5097 - DNA, 495 bp, Artificial Sequence; identical to SEQ ID NO: 2817
  source: /note="Description of Artificial Sequence: Synthetic polynucleotide"

SEQ ID NO: 5098 - DNA, 495 bp, Artificial Sequence; identical to SEQ ID NO: 2818
  source: /note="Description of Artificial Sequence: Synthetic polynucleotide"

SEQ ID NO: 5099 - DNA, 495 bp, Artificial Sequence; identical to SEQ ID NO: 2819
  source: /note="Description of Artificial Sequence: Synthetic polynucleotide"

SEQ ID NO: 5100 - DNA, 495 bp, Artificial Sequence; identical to SEQ ID NO: 2820
  source: /note="Description of Artificial Sequence: Synthetic polynucleotide"

SEQ ID NO: 5101 - DNA, 495 bp, Artificial Sequence; identical to SEQ ID NO: 2821
  source: /note="Description of Artificial Sequence: Synthetic polynucleotide"

SEQ ID NO: 5102 - DNA, 495 bp, Artificial Sequence; identical to SEQ ID NO: 2822
  source: /note="Description of Artificial Sequence: Synthetic polynucleotide"

SEQ ID NO: 5103 - DNA, 495 bp, Artificial Sequence; identical to SEQ ID NO: 2823
  source: /note="Description of Artificial Sequence: Synthetic polynucleotide"

SEQ ID NO: 5104 - DNA, 495 bp, Artificial Sequence; identical to SEQ ID NO: 2824
  source: /note="Description of Artificial Sequence: Synthetic polynucleotide"

SEQ ID NO: 5105 - DNA, 495 bp, Artificial Sequence; identical to SEQ ID NO: 2825
  source: /note="Description of Artificial Sequence: Synthetic polynucleotide"

SEQ ID NO: 5106 - DNA, 495 bp, Artificial Sequence; identical to SEQ ID NO: 2826
  source: /note="Description of Artificial Sequence: Synthetic polynucleotide"

SEQ ID NO: 5107 - DNA, 495 bp, Artificial Sequence; identical to SEQ ID NO: 2827
  source: /note="Description of Artificial Sequence: Synthetic polynucleotide"

SEQ ID NO: 5108 - DNA, 495 bp, Artificial Sequence; identical to SEQ ID NO: 2828
  source: /note="Description of Artificial Sequence: Synthetic polynucleotide"

SEQ ID NO: 5109 - DNA, 495 bp, Artificial Sequence; identical to SEQ ID NO: 2829
  source: /note="Description of Artificial Sequence: Synthetic polynucleotide"

SEQ ID NO: 5110 - DNA, 495 bp, Artificial Sequence; identical to SEQ ID NO: 2830
  source: /note="Description of Artificial Sequence: Synthetic polynucleotide"

SEQ ID NO: 5111 - DNA, 495 bp, Artificial Sequence; identical to SEQ ID NO: 2831
  source: /note="Description of Artificial Sequence: Synthetic polynucleotide"

SEQ ID NO: 5112 - DNA, 495 bp, Artificial Sequence; identical to SEQ ID NO: 2832
  source: /note="Description of Artificial Sequence: Synthetic polynucleotide"

SEQ ID NO: 5113 - DNA, 495 bp, Artificial Sequence; identical to SEQ ID NO: 2833
  source: /note="Description of Artificial Sequence: Synthetic polynucleotide"

SEQ ID NO: 5114 - DNA, 495 bp, Artificial Sequence; identical to SEQ ID NO: 2834
  source: /note="Description of Artificial Sequence: Synthetic polynucleotide"

SEQ ID NO: 5115 - DNA, 495 bp, Artificial Sequence; identical to SEQ ID NO: 2835
  source: /note="Description of Artificial Sequence: Synthetic polynucleotide"

SEQ ID NO: 5116 - DNA, 495 bp, Artificial Sequence; identical to SEQ ID NO: 2836
  source: /note="Description of Artificial Sequence: Synthetic polynucleotide"

SEQ ID NO: 5117 - DNA, 495 bp, Artificial Sequence; identical to SEQ ID NO: 2837
  source: /note="Description of Artificial Sequence: Synthetic polynucleotide"

SEQ ID NO: 5118 - DNA, 495 bp, Artificial Sequence; identical to SEQ ID NO: 2838
  source: /note="Description of Artificial Sequence: Synthetic polynucleotide"

SEQ ID NO: 5119 - DNA, 495 bp, Artificial Sequence; identical to SEQ ID NO: 2839
  source: /note="Description of Artificial Sequence: Synthetic polynucleotide"

SEQ ID NO: 5120 - DNA, 495 bp, Artificial Sequence; identical to SEQ ID NO: 2840
  source: /note="Description of Artificial Sequence: Synthetic polynucleotide"

SEQ ID NO: 5121 - DNA, 495 bp, Artificial Sequence; identical to SEQ ID NO: 2841
  source: /note="Description of Artificial Sequence: Synthetic polynucleotide"

SEQ ID NO: 5122 - DNA, 495 bp, Artificial Sequence; identical to SEQ ID NO: 2842
  source: /note="Description of Artificial Sequence: Synthetic polynucleotide"

SEQ ID NO: 5123 - DNA, 495 bp, Artificial Sequence; identical to SEQ ID NO: 2843
  source: /note="Description of Artificial Sequence: Synthetic polynucleotide"

SEQ ID NO: 5124 - DNA, 495 bp, Artificial Sequence; identical to SEQ ID NO: 2844
  source: /note="Description of Artificial Sequence: Synthetic polynucleotide"

SEQ ID NO: 5125 - DNA, 495 bp, Artificial Sequence; identical to SEQ ID NO: 2845
  source: /note="Description of Artificial Sequence: Synthetic polynucleotide"

SEQ ID NO: 5126 - DNA, 495 bp, Artificial Sequence; identical to SEQ ID NO: 2846
  source: /note="Description of Artificial Sequence: Synthetic polynucleotide"

SEQ ID NO: 5127 - DNA, 495 bp, Artificial Sequence; identical to SEQ ID NO: 2847
  source: /note="Description of Artificial Sequence: Synthetic polynucleotide"

SEQ ID NO: 5128 - DNA, 495 bp, Artificial Sequence; identical to SEQ ID NO: 2848
  source: /note="Description of Artificial Sequence: Synthetic polynucleotide"

SEQ ID NO: 5129 - DNA, 495 bp, Artificial Sequence; identical to SEQ ID NO: 2849
  source: /note="Description of Artificial Sequence: Synthetic polynucleotide"

SEQ ID NO: 5130 - DNA, 495 bp, Artificial Sequence; identical to SEQ ID NO: 2850
  source: /note="Description of Artificial Sequence: Synthetic polynucleotide"

SEQ ID NO: 5131 - DNA, 495 bp, Artificial Sequence; identical to SEQ ID NO: 2851
  source: /note="Description of Artificial Sequence: Synthetic polynucleotide"

SEQ ID NO: 5132 - DNA, 495 bp, Artificial Sequence; identical to SEQ ID NO: 2852
  source: /note="Description of Artificial Sequence: Synthetic polynucleotide"

SEQ ID NO: 5133 - DNA, 495 bp, Artificial Sequence; identical to SEQ ID NO: 2853
  source: /note="Description of Artificial Sequence: Synthetic polynucleotide"

SEQ ID NO: 5134 - DNA, 495 bp, Artificial Sequence; identical to SEQ ID NO: 2854
  source: /note="Description of Artificial Sequence: Synthetic polynucleotide"

SEQ ID NO: 5135 - DNA, 495 bp, Artificial Sequence; identical to SEQ ID NO: 2855
  source: /note="Description of Artificial Sequence: Synthetic polynucleotide"

SEQ ID NO: 5136 - DNA, 495 bp, Artificial Sequence; identical to SEQ ID NO: 2856
  source: /note="Description of Artificial Sequence: Synthetic polynucleotide"

SEQ ID NO: 5137 - DNA, 495 bp, Artificial Sequence; identical to SEQ ID NO: 2857
  source: /note="Description of Artificial Sequence: Synthetic polynucleotide"

SEQ ID NO: 5138 - DNA, 495 bp, Artificial Sequence; identical to SEQ ID NO: 2858
  source: /note="Description of Artificial Sequence: Synthetic polynucleotide"

SEQ ID NO: 5139 - DNA, 495 bp, Artificial Sequence; identical to SEQ ID NO: 2859
  source: /note="Description of Artificial Sequence: Synthetic polynucleotide"

SEQ ID NO: 5140 - DNA, 495 bp, Artificial Sequence; identical to SEQ ID NO: 2860
  source: /note="Description of Artificial Sequence: Synthetic polynucleotide"

SEQ ID NO: 5141 - DNA, 495 bp, Artificial Sequence; identical to SEQ ID NO: 2861
  source: /note="Description of Artificial Sequence: Synthetic polynucleotide"

SEQ ID NO: 5142 - DNA, 495 bp, Artificial Sequence; identical to SEQ ID NO: 2862
  source: /note="Description of Artificial Sequence: Synthetic polynucleotide"

SEQ ID NO: 5143 - DNA, 495 bp, Artificial Sequence; identical to SEQ ID NO: 2863
  source: /note="Description of Artificial Sequence: Synthetic polynucleotide"

SEQ ID NO: 5144 - DNA, 495 bp, Artificial Sequence; identical to SEQ ID NO: 2864
  source: /note="Description of Artificial Sequence: Synthetic polynucleotide"

SEQ ID NO: 5145 - DNA, 495 bp, Artificial Sequence; identical to SEQ ID NO: 2865
  source: /note="Description of Artificial Sequence: Synthetic polynucleotide"

SEQ ID NO: 5146 - DNA, 495 bp, Artificial Sequence; identical to SEQ ID NO: 2866
  source: /note="Description of Artificial Sequence: Synthetic polynucleotide"

SEQ ID NO: 5147 - DNA, 495 bp, Artificial Sequence; identical to SEQ ID NO: 2867
  source: /note="Description of Artificial Sequence: Synthetic polynucleotide"

SEQ ID NO: 5148 - DNA, 495 bp, Artificial Sequence; identical to SEQ ID NO: 2868
  source: /note="Description of Artificial Sequence: Synthetic polynucleotide"

SEQ ID NO: 5149 - DNA, 495 bp, Artificial Sequence; identical to SEQ ID NO: 2869
  source: /note="Description of Artificial Sequence: Synthetic polynucleotide"

SEQ ID NO: 5150 - DNA, 495 bp, Artificial Sequence; identical to SEQ ID NO: 2870
  source: /note="Description of Artificial Sequence: Synthetic polynucleotide"

SEQ ID NO: 5151 - DNA, 495 bp, Artificial Sequence; identical to SEQ ID NO: 2871
  source: /note="Description of Artificial Sequence: Synthetic polynucleotide"

SEQ ID NO: 5152 - DNA, 495 bp, Artificial Sequence; identical to SEQ ID NO: 2872
  source: /note="Description of Artificial Sequence: Synthetic polynucleotide"

SEQ ID NO: 5153 - DNA, 495 bp, Artificial Sequence; identical to SEQ ID NO: 2873
  source: /note="Description of Artificial Sequence: Synthetic polynucleotide"

SEQ ID NO: 5154 - DNA, 495 bp, Artificial Sequence; identical to SEQ ID NO: 2874
  source: /note="Description of Artificial Sequence: Synthetic polynucleotide"

SEQ ID NO: 5155 - DNA, 495 bp, Artificial Sequence; identical to SEQ ID NO: 2875
  source: /note="Description of Artificial Sequence: Synthetic polynucleotide"

SEQ ID NO: 5156 - DNA, 495 bp, Artificial Sequence; identical to SEQ ID NO: 2876
  source: /note="Description of Artificial Sequence: Synthetic polynucleotide"

SEQ ID NO: 5157 - DNA, 495 bp, Artificial Sequence; identical to SEQ ID NO: 2877
  source: /note="Description of Artificial Sequence: Synthetic polynucleotide"

SEQ ID NO: 5158 - DNA, 495 bp, Artificial Sequence; identical to SEQ ID NO: 2878
  source: /note="Description of Artificial Sequence: Synthetic polynucleotide"

SEQ ID NO: 5159 - DNA, 495 bp, Artificial Sequence; identical to SEQ ID NO: 2879
  source: /note="Description of Artificial Sequence: Synthetic polynucleotide"

SEQ ID NO: 5160 - DNA, 495 bp, Artificial Sequence; identical to SEQ ID NO: 2880
  source: /note="Description of Artificial Sequence: Synthetic polynucleotide"

SEQ ID NO: 5161 - DNA, 495 bp, Artificial Sequence; identical to SEQ ID NO: 2881
  source: /note="Description of Artificial Sequence: Synthetic polynucleotide"

SEQ ID NO: 5162 - DNA, 495 bp, Artificial Sequence; identical to SEQ ID NO: 2882
  source: /note="Description of Artificial Sequence: Synthetic polynucleotide"

SEQ ID NO: 5163 - DNA, 495 bp, Artificial Sequence; identical to SEQ ID NO: 2883
  source: /note="Description of Artificial Sequence: Synthetic polynucleotide"

SEQ ID NO: 5164 - DNA, 495 bp, Artificial Sequence; identical to SEQ ID NO: 2884
  source: /note="Description of Artificial Sequence: Synthetic polynucleotide"

SEQ ID NO: 5165 - DNA, 495 bp, Artificial Sequence; identical to SEQ ID NO: 2885
  source: /note="Description of Artificial Sequence: Synthetic polynucleotide"

SEQ ID NO: 5166 - DNA, 495 bp, Artificial Sequence; identical to SEQ ID NO: 2886
  source: /note="Description of Artificial Sequence: Synthetic polynucleotide"

SEQ ID NO: 5167 - DNA, 495 bp, Artificial Sequence; identical to SEQ ID NO: 2887
  source: /note="Description of Artificial Sequence: Synthetic polynucleotide"

SEQ ID NO: 5168 - DNA, 495 bp, Artificial Sequence; identical to SEQ ID NO: 2888
  source: /note="Description of Artificial Sequence: Synthetic polynucleotide"

SEQ ID NO: 5169 - DNA, 495 bp, Artificial Sequence; identical to SEQ ID NO: 2889
  source: /note="Description of Artificial Sequence: Synthetic polynucleotide"

SEQ ID NO: 5170 - DNA, 495 bp, Artificial Sequence; identical to SEQ ID NO: 2890
  source: /note="Description of Artificial Sequence: Synthetic polynucleotide"

SEQ ID NO: 5171 - DNA, 495 bp, Artificial Sequence; identical to SEQ ID NO: 2891
  source: /note="Description of Artificial Sequence: Synthetic polynucleotide"

SEQ ID NO: 5172 - DNA, 495 bp, Artificial Sequence; identical to SEQ ID NO: 2892
  source: /note="Description of Artificial Sequence: Synthetic polynucleotide"

SEQ ID NO: 5173 - DNA, 495 bp, Artificial Sequence; identical to SEQ ID NO: 2893
  source: /note="Description of Artificial Sequence: Synthetic polynucleotide"

SEQ ID NO: 5174 - DNA, 495 bp, Artificial Sequence; identical to SEQ ID NO: 2894
  source: /note="Description of Artificial Sequence: Synthetic polynucleotide"

SEQ ID NO: 5175 - DNA, 495 bp, Artificial Sequence; identical to SEQ ID NO: 2895
  source: /note="Description of Artificial Sequence: Synthetic polynucleotide"

SEQ ID NO: 5176 - DNA, 495 bp, Artificial Sequence; identical to SEQ ID NO: 2896
  source: /note="Description of Artificial Sequence: Synthetic polynucleotide"

SEQ ID NO: 5177 - DNA, 495 bp, Artificial Sequence; identical to SEQ ID NO: 2897
  source: /note="Description of Artificial Sequence: Synthetic polynucleotide"

SEQ ID NO: 5178 - DNA, 495 bp, Artificial Sequence; identical to SEQ ID NO: 2898
  source: /note="Description of Artificial Sequence: Synthetic polynucleotide"

SEQ ID NO: 5179 - DNA, 495 bp, Artificial Sequence; identical to SEQ ID NO: 2899
  source: /note="Description of Artificial Sequence: Synthetic polynucleotide"

SEQ ID NO: 5180 - DNA, 495 bp, Artificial Sequence; identical to SEQ ID NO: 2900
  source: /note="Description of Artificial Sequence: Synthetic polynucleotide"

SEQ ID NO: 5181 - DNA, 495 bp, Artificial Sequence; identical to SEQ ID NO: 2901
  source: /note="Description of Artificial Sequence: Synthetic polynucleotide"

SEQ ID NO: 5182 - DNA, 495 bp, Artificial Sequence; identical to SEQ ID NO: 2902
  source: /note="Description of Artificial Sequence: Synthetic polynucleotide"

SEQ ID NO: 5183 - DNA, 495 bp, Artificial Sequence; identical to SEQ ID NO: 2903
  source: /note="Description of Artificial Sequence: Synthetic polynucleotide"

SEQ ID NO: 5184 - DNA, 495 bp, Artificial Sequence; identical to SEQ ID NO: 2904
  source: /note="Description of Artificial Sequence: Synthetic polynucleotide"

SEQ ID NO: 5185 - DNA, 495 bp, Artificial Sequence; identical to SEQ ID NO: 2905
  source: /note="Description of Artificial Sequence: Synthetic polynucleotide"

SEQ ID NO: 5186 - DNA, 495 bp, Artificial Sequence; identical to SEQ ID NO: 2906
  source: /note="Description of Artificial Sequence: Synthetic polynucleotide"

SEQ ID NO: 5187 - DNA, 495 bp, Artificial Sequence; identical to SEQ ID NO: 2907
  source: /note="Description of Artificial Sequence: Synthetic polynucleotide"

SEQ ID NO: 5188 - DNA, 495 bp, Artificial Sequence; identical to SEQ ID NO: 2908
  source: /note="Description of Artificial Sequence: Synthetic polynucleotide"

SEQ ID NO: 5189 - DNA, 495 bp, Artificial Sequence; identical to SEQ ID NO: 2909
  source: /note="Description of Artificial Sequence: Synthetic polynucleotide"

SEQ ID NO: 5190 - DNA, 495 bp, Artificial Sequence; identical to SEQ ID NO: 2910
  source: /note="Description of Artificial Sequence: Synthetic polynucleotide"

SEQ ID NO: 5191 - DNA, 495 bp, Artificial Sequence; identical to SEQ ID NO: 2911
  source: /note="Description of Artificial Sequence: Synthetic polynucleotide"

SEQ ID NO: 5192 - DNA, 495 bp, Artificial Sequence; identical to SEQ ID NO: 2912
  source: /note="Description of Artificial Sequence: Synthetic polynucleotide"

SEQ ID NO: 5193 - DNA, 495 bp, Artificial Sequence; identical to SEQ ID NO: 2913
  source: /note="Description of Artificial Sequence: Synthetic polynucleotide"

SEQ ID NO: 5194 - DNA, 495 bp, Artificial Sequence; identical to SEQ ID NO: 2914
  source: /note="Description of Artificial Sequence: Synthetic polynucleotide"

SEQ ID NO: 5195 - DNA, 495 bp, Artificial Sequence; identical to SEQ ID NO: 2915
  source: /note="Description of Artificial Sequence: Synthetic polynucleotide"

SEQ ID NO: 5196 - DNA, 495 bp, Artificial Sequence; identical to SEQ ID NO: 2916
  source: /note="Description of Artificial Sequence: Synthetic polynucleotide"

SEQ ID NO: 5197 - DNA, 495 bp, Artificial Sequence; identical to SEQ ID NO: 2917
  source: /note="Description of Artificial Sequence: Synthetic polynucleotide"

SEQ ID NO: 5198 - DNA, 495 bp, Artificial Sequence; identical to SEQ ID NO: 2918
  source: /note="Description of Artificial Sequence: Synthetic polynucleotide"

SEQ ID NO: 5199 - DNA, 448 bp, Artificial Sequence; identical to SEQ ID NO: 2919
  source: /note="Description of Artificial Sequence: Synthetic polynucleotide"

SEQ ID NO: 5200 - DNA, 495 bp, Artificial Sequence; identical to SEQ ID NO: 2920
  source: /note="Description of Artificial Sequence: Synthetic polynucleotide"

SEQ ID NO: 5201 - DNA, 49 bp, Artificial Sequence
  source: /note="Description of Artificial Sequence: Synthetic oligonucleotide"
gggctggcaagccacgtttggtgagcccccagggaagaagctgaagtgg

SEQ ID NO: 5202 - DNA, 49 bp, Artificial Sequence
  source: /note="Description of Artificial Sequence: Synthetic oligonucleotide"
gggctggcaagccacgtttggtgaggctccagggaatgggctggagttg

SEQ ID NO: 5203 - DNA, 49 bp, Artificial Sequence
  source: /note="Description of Artificial Sequence: Synthetic oligonucleotide"
gggctggcaagccacgtttggtgaggcttcaggacaggggttggtgtgg

SEQ ID NO: 5204 - DNA, 49 bp, Artificial Sequence
  source: /note="Description of Artificial Sequence: Synthetic oligonucleotide"
gggctggcaagccacgtttggtgaggcttcatgacaggggtgggtgtgg

SEQ ID NO: 5205 - DNA, 50 bp, Artificial Sequence
  source: /note="Description of Artificial Sequence: Synthetic oligonucleotide"
gggctggcaagccacgtttggtgcaagctccagggaagggactggagtgg

SEQ ID NO: 5206 - DNA, 54 bp, Artificial Sequence
  source: /note="Description of Artificial Sequence: Synthetic oligonucleotide"
gggctggcaagccacgtttggtgcaatgagactctagggaaggggctggaggga

SEQ ID NO: 5207 - DNA, 46 bp, Artificial Sequence
  source: /note="Description of Artificial Sequence: Synthetic oligonucleotide"
gggctggcaagccacgtttggtgcaccagggaagggcctggagtgg

SEQ ID NO: 5208 - DNA, 53 bp, Artificial Sequence
  source: /note="Description of Artificial Sequence: Synthetic oligonucleotide"
gggctggcaagccacgtttggtgcacgagtccacatgggaaggactggagtgg

SEQ ID NO: 5209 - DNA, 47 bp, Artificial Sequence
  source: /note="Description of Artificial Sequence: Synthetic oligonucleotide"
gggctggcaagccacgtttggtgcactagcccgcttccatgggctgt

SEQ ID NO: 5210 - DNA, 53 bp, Artificial Sequence
  source: /note="Description of Artificial Sequence: Synthetic oligonucleotide"
gggctggcaagccacgtttggtgcagcaggcttcacaacagggattgtggtgg

SEQ ID NO: 5211 - DNA, 53 bp, Artificial Sequence
  source: /note="Description of Artificial Sequence: Synthetic oligonucleotide"
gggctggcaagccacgtttggtgcagcaggcttcatgacagggattggtgtgg

SEQ ID NO: 5212 - DNA, 50 bp, Artificial Sequence
  source: /note="Description of Artificial Sequence: Synthetic oligonucleotide"
gggctggcaagccacgtttggtgcaggcccatggacaagggcttgaggaa

SEQ ID NO: 5213 - DNA, 50 bp, Artificial Sequence
  source: /note="Description of Artificial Sequence: Synthetic oligonucleotide"
gggctggcaagccacgtttggtgcaggctccagggaacagactggagtgg

SEQ ID NO: 5214 - DNA, 50 bp, Artificial Sequence
  source: /note="Description of Artificial Sequence: Synthetic oligonucleotide"
gggctggcaagccacgtttggtgcaggcttctgggaaagggctggagtgg

SEQ ID NO: 5215 - DNA, 50 bp, Artificial Sequence
  source: /note="Description of Artificial Sequence: Synthetic oligonucleotide"
gggctggcaagccacgtttggtgcagtccccatcgagaggccttgagtgg

SEQ ID NO: 5216 - DNA, 50 bp, Artificial Sequence
  source: /note="Description of Artificial Sequence: Synthetic oligonucleotide"
gggctggcaagccacgtttggtgcagtcccctggacaagggcttgagtgg

SEQ ID NO: 5217 - DNA, 53 bp, Artificial Sequence
  source: /note="Description of Artificial Sequence: Synthetic oligonucleotide"
gggctggcaagccacgtttggtgcatcaggctcctgggaaagggctggagtag

SEQ ID NO: 5218 - DNA, 51 bp, Artificial Sequence
  source: /note="Description of Artificial Sequence: Synthetic oligonucleotide"
gggctggcaagccacgtttggtgccagatgcccgggaaagaactggagtgg

SEQ ID NO: 5219 - DNA, 54 bp, Artificial Sequence
  source: /note="Description of Artificial Sequence: Synthetic oligonucleotide"
gggctggcaagccacgtttggtgccagcacgcttcacaacaggaattggtgtgg

SEQ ID NO: 5220 - DNA, 54 bp, Artificial Sequence
  source: /note="Description of Artificial Sequence: Synthetic oligonucleotide"
gggctggcaagccacgtttggtgccagcacgcttcacaacagggataggtgtgg

SEQ ID NO: 5221 - DNA, 51 bp, Artificial Sequence
  source: /note="Description of Artificial Sequence: Synthetic oligonucleotide"
gggctggcaagccacgtttggtgccaggctccaggaaagggtttggagtgg

SEQ ID NO: 5222 - DNA, 45 bp, Artificial Sequence
  source: /note="Description of Artificial Sequence: Synthetic oligonucleotide"
gggctggcaagccacgtttggtgcccagggaaggccctggagtgg

SEQ ID NO: 5223 - DNA, 45 bp, Artificial Sequence
  source: /note="Description of Artificial Sequence: Synthetic oligonucleotide"
gggctggcaagccacgtttggtgcccagggaagggcctggagtgg

SEQ ID NO: 5224 - DNA, 45 bp, Artificial Sequence
  source: /note="Description of Artificial Sequence: Synthetic oligonucleotide"
gggctggcaagccacgtttggtgcccagggaaggggctggagtgg

SEQ ID NO: 5225 - DNA, 46 bp, Artificial Sequence
  source: /note="Description of Artificial Sequence: Synthetic oligonucleotide"
gggctggcaagccacgtttggtgccccaggaaaggccctggagtgg

SEQ ID NO: 5226 - DNA, 46 bp, Artificial Sequence
  source: /note="Description of Artificial Sequence: Synthetic oligonucleotide"
gggctggcaagccacgtttggtgccccaggacaggggcttgagtgg

SEQ ID NO: 5227 - DNA, 46 bp, Artificial Sequence
  source: /note="Description of Artificial Sequence: Synthetic oligonucleotide"
gggctggcaagccacgtttggtgccccagggaagggactggagtgg

SEQ ID NO: 5228 - DNA, 46 bp, Artificial Sequence
  source: /note="Description of Artificial Sequence: Synthetic oligonucleotide"
gggctggcaagccacgtttggtgccccagggaaggggctggaatgg

SEQ ID NO: 5229 - DNA, 47 bp, Artificial Sequence
  source: /note="Description of Artificial Sequence: Synthetic oligonucleotide"
gggctggcaagccacgtttggtgcccccagggaagggaatggagtgg

SEQ ID NO: 5230 - DNA, 47 bp, Artificial Sequence
  source: /note="Description of Artificial Sequence: Synthetic oligonucleotide"
gggctggcaagccacgtttggtgccccccaggaagggactggagtga

SEQ ID NO: 5231 - DNA, 46 bp, Artificial Sequence
  source: /note="Description of Artificial Sequence: Synthetic oligonucleotide"
gggctggcaagccacgtttggtgcccccggacaagcgcttgagtgg

SEQ ID NO: 5232 - DNA, 49 bp, Artificial Sequence
  source: /note="Description of Artificial Sequence: Synthetic oligonucleotide"
gggctggcaagccacgtttggtgcccctctctgggagggaatggagtgg

SEQ ID NO: 5233 - DNA, 47 bp, Artificial Sequence
  source: /note="Description of Artificial Sequence: Synthetic oligonucleotide"
gggctggcaagccacgtttggtgcccgtgggcaacaggctggaatgg

SEQ ID NO: 5234 - DNA, 47 bp, Artificial Sequence
  source: /note="Description of Artificial Sequence: Synthetic oligonucleotide"
gggctggcaagccacgtttggtgccctcagcaaaggccctggagtgg

SEQ ID NO: 5235 - DNA, 46 bp, Artificial Sequence
  source: /note="Description of Artificial Sequence: Synthetic oligonucleotide"
gggctggcaagccacgtttggtgccgcaaggaagggactggagcga

SEQ ID NO: 5236 - DNA, 54 bp, Artificial Sequence
  source: /note="Description of Artificial Sequence: Synthetic oligonucleotide"
gggctggcaagccacgtttggtgccgccaagctacaggaaaaggtctggagtgg

SEQ ID NO: 5237 - DNA, 49 bp, Artificial Sequence
  source: /note="Description of Artificial Sequence: Synthetic oligonucleotide"
gggctggcaagccacgtttggtgccgccagtcctcagtcaagggagtgg

SEQ ID NO: 5238 - DNA, 43 bp, Artificial Sequence
  source: /note="Description of Artificial Sequence: Synthetic oligonucleotide"
gggctggcaagccacgtttggtgccgggaaggggctggagtgg

SEQ ID NO: 5239 - DNA, 51 bp, Artificial Sequence
  source: /note="Description of Artificial Sequence: Synthetic oligonucleotide"
gggctggcaagccacgtttggtgccgggcttcaagaaaggggctggaatgg

SEQ ID NO: 5240 - DNA, 44 bp, Artificial Sequence
  source: /note="Description of Artificial Sequence: Synthetic oligonucleotide"
gggctggcaagccacgtttggtgccggggaagggactggagcga

SEQ ID NO: 5241 - DNA, 61 bp, Artificial Sequence
  source: /note="Description of Artificial Sequence: Synthetic oligonucleotide"
gggctggcaagccacgtttggtgcctggatccaccatctcccatcaaaaggtcttcagtgt

SEQ ID NO: 5242 - DNA, 53 bp, Artificial Sequence
  source: /note="Description of Artificial Sequence: Synthetic oligonucleotide"
gggctggcaagccacgtttggtgcgccaggctccaagaaagggtttgtagtgg

SEQ ID NO: 5243 - DNA, 45 bp, Artificial Sequence
  source: /note="Description of Artificial Sequence: Synthetic oligonucleotide"
gggctggcaagccacgtttggtgcgccgggaagggactggagtgg

SEQ ID NO: 5244 - DNA, 46 bp, Artificial Sequence
  source: /note="Description of Artificial Sequence: Synthetic oligonucleotide"
gggctggcaagccacgtttggtgctccaggcaaggggctggagtgg

SEQ ID NO: 5245 - DNA, 46 bp, Artificial Sequence
  source: /note="Description of Artificial Sequence: Synthetic oligonucleotide"
gggctggcaagccacgtttggtgctccagggaagggcctggagtgg

SEQ ID NO: 5246 - DNA, 46 bp, Artificial Sequence
  source: /note="Description of Artificial Sequence: Synthetic oligonucleotide"
gggctggcaagccacgtttggtgctccagggaaggggctggagtgg

SEQ ID NO: 5247 - DNA, 46 bp, Artificial Sequence
  source: /note="Description of Artificial Sequence: Synthetic oligonucleotide"
gggctggcaagccacgtttggtgctccagggaaggggctggtgtgg

SEQ ID NO: 5248 - DNA, 46 bp, Artificial Sequence
  source: /note="Description of Artificial Sequence: Synthetic oligonucleotide"
gggctggcaagccacgtttggtgctccagggaagggtccggagtgg

SEQ ID NO: 5249 - DNA, 48 bp, Artificial Sequence
  source: /note="Description of Artificial Sequence: Synthetic oligonucleotide"
gggctggcaagccacgtttggtgctccccagggaagggactggagtga

SEQ ID NO: 5250 - DNA, 46 bp, Artificial Sequence
  source: /note="Description of Artificial Sequence: Synthetic oligonucleotide"
gggctggcaagccacgtttggtgctccggagaaggggctggagtgg

SEQ ID NO: 5251 - DNA, 46 bp, Artificial Sequence
  source: /note="Description of Artificial Sequence: Synthetic oligonucleotide"
gggctggcaagccacgtttggtgctccggggaagggtctggagtgg

SEQ ID NO: 5252 - DNA, 46 bp, Artificial Sequence
  source: /note="Description of Artificial Sequence: Synthetic oligonucleotide"
gggctggcaagccacgtttggtgctgcaggcaaggggctggagtga

SEQ ID NO: 5253 - DNA, 54 bp, Artificial Sequence
  source: /note="Description of Artificial Sequence: Synthetic oligonucleotide"
gggctggcaagccacgtttggtgctgcttgcccctagaagatggacaggagtgg

SEQ ID NO: 5254 - DNA, 43 bp, Artificial Sequence
  source: /note="Description of Artificial Sequence: Synthetic oligonucleotide"
gggctggcaagccacgtttggtgctgggaaggcgctggggcac

SEQ ID NO: 5255 - DNA, 46 bp, Artificial Sequence
  source: /note="Description of Artificial Sequence: Synthetic oligonucleotide"
gggctggcaagccacgtttggtgctgggggacagaggctggagtgg

SEQ ID NO: 5256 - DNA, 55 bp, Artificial Sequence
  source: /note="Description of Artificial Sequence: Synthetic oligonucleotide"
gggctggcaagccacgtttggtgctgtaggcactggatggaaagcacaggagtgg

SEQ ID NO: 5257 - DNA, 52 bp, Artificial Sequence
  source: /note="Description of Artificial Sequence: Synthetic oligonucleotide"
gggctggcaagccacgtttggtggacaggctcctggaaaagggcttgagtgg

SEQ ID NO: 5258 - DNA, 48 bp, Artificial Sequence
  source: /note="Description of Artificial Sequence: Synthetic oligonucleotide"
gggctggcaagccacgtttggtggatgcccgggaaaggcttggagtgg

SEQ ID NO: 5259 - DNA, 51 bp, Artificial Sequence
  source: /note="Description of Artificial Sequence: Synthetic oligonucleotide"
gggctggcaagccacgtttggtggcaggcttcatgacaggggtgggtgtag

SEQ ID NO: 5260 - DNA, 52 bp, Artificial Sequence
  source: /note="Description of Artificial Sequence: Synthetic oligonucleotide"
gggctggcaagccacgtttggtggccaggctccagggaagggactggaatat

SEQ ID NO: 5261 - DNA, 48 bp, Artificial Sequence
  source: /note="Description of Artificial Sequence: Synthetic oligonucleotide"
gggctggcaagccacgtttggtggcccccatgggaggtactggagtgg

SEQ ID NO: 5262 - DNA, 47 bp, Artificial Sequence
  source: /note="Description of Artificial Sequence: Synthetic oligonucleotide"
gggctggcaagccacgtttggtggcccccggacaaaggcttgagtgg

SEQ ID NO: 5263 - DNA, 47 bp, Artificial Sequence
  source: /note="Description of Artificial Sequence: Synthetic oligonucleotide"
gggctggcaagccacgtttggtggcccctggacaagggcttgagtgg

SEQ ID NO: 5264 - DNA, 45 bp, Artificial Sequence
  source: /note="Description of Artificial Sequence: Synthetic oligonucleotide"
gggctggcaagccacgtttggtggcccgggaaaggcctggagtgg

SEQ ID NO: 5265 - DNA, 47 bp, Artificial Sequence
  source: /note="Description of Artificial Sequence: Synthetic oligonucleotide"
gggctggcaagccacgtttggtggcctcagggaaggggctggaatgg

SEQ ID NO: 5266 - DNA, 47 bp, Artificial Sequence
  source: /note="Description of Artificial Sequence: Synthetic oligonucleotide"
gggctggcaagccacgtttggtggctccaggaaaggggctgcagtga

SEQ ID NO: 5267 - DNA, 47 bp, Artificial Sequence
  source: /note="Description of Artificial Sequence: Synthetic oligonucleotide"
gggctggcaagccacgtttggtggctccaggaaaggggctggagtgg

SEQ ID NO: 5268 - DNA, 47 bp, Artificial Sequence
  source: /note="Description of Artificial Sequence: Synthetic oligonucleotide"
gggctggcaagccacgtttggtggctccagggaaggggctggagtga

SEQ ID NO: 5269 - DNA, 47 bp, Artificial Sequence
  source: /note="Description of Artificial Sequence: Synthetic oligonucleotide"
gggctggcaagccacgtttggtggctccagggaagggtctgcagtgg

SEQ ID NO: 5270 - DNA, 47 bp, Artificial Sequence
  source: /note="Description of Artificial Sequence: Synthetic oligonucleotide"
gggctggcaagccacgtttggtggctctcagggaggggctgcaatgg

SEQ ID NO: 5271 - DNA, 47 bp, Artificial Sequence
  source: /note="Description of Artificial Sequence: Synthetic oligonucleotide"
gggctggcaagccacgtttggtggctggaggagaggggctggagtgg

SEQ ID NO: 5272 - DNA, 47 bp, Artificial Sequence
  source: /note="Description of Artificial Sequence: Synthetic oligonucleotide"
gggctggcaagccacgtttggtggcttccgggaaagggctggagtgg

SEQ ID NO: 5273 - DNA, 48 bp, Artificial Sequence
  source: /note="Description of Artificial Sequence: Synthetic oligonucleotide"
gggctggcaagccacgtttggtgggccactggacaagggcttgagtgg

SEQ ID NO: 5274 - DNA, 48 bp, Artificial Sequence
  source: /note="Description of Artificial Sequence: Synthetic oligonucleotide"
gggctggcaagccacgtttggtgggcccatgcacaagggcttgagtgg

SEQ ID NO: 5275 - DNA, 48 bp, Artificial Sequence
  source: /note="Description of Artificial Sequence: Synthetic oligonucleotide"
gggctggcaagccacgtttggtgggcccctggaaaagggcttgagtgg

SEQ ID NO: 5276 - DNA, 48 bp, Artificial Sequence
  source: /note="Description of Artificial Sequence: Synthetic oligonucleotide"
gggctggcaagccacgtttggtgggcccctggacaagggcttgaaagg

SEQ ID NO: 5277 - DNA, 48 bp, Artificial Sequence
  source: /note="Description of Artificial Sequence: Synthetic oligonucleotide"
gggctggcaagccacgtttggtgggctccagggaagggtctggagtgg

SEQ ID NO: 5278 - DNA, 48 bp, Artificial Sequence
  source: /note="Description of Artificial Sequence: Synthetic oligonucleotide"
gggctggcaagccacgtttggtgggctcgtggacaacgccttgagtgg

SEQ ID NO: 5279 - DNA, 47 bp, Artificial Sequence
  source: /note="Description of Artificial Sequence: Synthetic oligonucleotide"
gggctggcaagccacgtttggtggggccctggacaagggcatagtgg

SEQ ID NO: 5280 - DNA, 56 bp, Artificial Sequence
  source: /note="Description of Artificial Sequence: Synthetic oligonucleotide"
gggctggcaagccacgtttggtggtccagcaggattcatggcaagtgttggtgagg

SEQ ID NO: 5281 - DNA, 56 bp, Artificial Sequence
  source: /note="Description of Artificial Sequence: Synthetic oligonucleotide"
gggctggcaagccacgtttggtggtgtgacaggcccctggataagggtttgaatgg

SEQ ID NO: 5282 - DNA, 55 bp, Artificial Sequence
  source: /note="Description of Artificial Sequence: Synthetic oligonucleotide"
gggctggcaagccacgtttggtgtccagcaggcttcatgacagggatttgtgtgg

SEQ ID NO: 5283 - DNA, 45 bp, Artificial Sequence
  source: /note="Description of Artificial Sequence: Synthetic oligonucleotide"
gggctggcaagccacgtttggtgtcccgggaaggggctggaatgg

SEQ ID NO: 5284 - DNA, 47 bp, Artificial Sequence
  source: /note="Description of Artificial Sequence: Synthetic oligonucleotide"
gggctggcaagccacgtttggtgtctccaggcaaggggctggagtga

SEQ ID NO: 5285 - DNA, 53 bp, Artificial Sequence
  source: /note="Description of Artificial Sequence: Synthetic oligonucleotide"
gggctggcaagccacgtttggtgtgatagacccctggacagggctttgagtgg

SEQ ID NO: 5286 - DNA, 54 bp, Artificial Sequence
  source: /note="Description of Artificial Sequence: Synthetic oligonucleotide"
gggctggcaagccacgtttggtgtgtgacaaagccctggacaagggcatagtgg

SEQ ID NO: 5287 - DNA, 48 bp, Artificial Sequence
  source: /note="Description of Artificial Sequence: Synthetic oligonucleotide"
ccgggagctgcatgtgtcagaggcacctgaggagacggtgaccagggt

SEQ ID NO: 5288 - DNA, 51 bp, Artificial Sequence
  source: /note="Description of Artificial Sequence: Synthetic oligonucleotide"
ccgggagctgcatgtgtcagaggactcacctgaggagacagtgaccagggt

SEQ ID NO: 5289 - DNA, 60 bp, Artificial Sequence
  source: /note="Description of Artificial Sequence: Synthetic oligonucleotide"
ccgggagctgcatgtgtcagaggggaaagccatcttacctgaagagacggtgaccattgt

SEQ ID NO: 5290 - DNA, 51 bp, Artificial Sequence
  source: /note="Description of Artificial Sequence: Synthetic oligonucleotide"
ccgggagctgcatgtgtcagaggtcttacctgaggagacggtgaccgtggt

SEQ ID NO: 5291 - DNA, 43 bp, Artificial Sequence
  source: /note="Description of Artificial Sequence: Synthetic oligonucleotide"
ccgggagctgcatgtgtcagagggtggctgcggtctccagggc

SEQ ID NO: 5292 - DNA, 41 bp, Artificial Sequence
  source: /note="Description of Artificial Sequence: Synthetic oligonucleotide"
ccgggagctgcatgtgtcagaggggagacggtggccgggct

SEQ ID NO: 5293 - DNA, 47 bp, Artificial Sequence
  source: /note="Description of Artificial Sequence: Synthetic oligonucleotide"
ccgggagctgcatgtgtcagagggcctgacccctcagaagccagacc

SEQ ID NO: 5294 - DNA, 26 bp, Artificial Sequence
  source: /note="Description of Artificial Sequence: Synthetic oligonucleotide"
agcccccagggaagaagctgaagtgg

SEQ ID NO: 5295 - DNA, 26 bp, Artificial Sequence
  source: /note="Description of Artificial Sequence: Synthetic oligonucleotide"
aggctccagggaatgggctggagttg

SEQ ID NO: 5296 - DNA, 26 bp, Artificial Sequence
  source: /note="Description of Artificial Sequence: Synthetic oligonucleotide"
aggcttcaggacaggggttggtgtgg

SEQ ID NO: 5297 - DNA, 26 bp, Artificial Sequence
  source: /note="Description of Artificial Sequence: Synthetic oligonucleotide"
aggcttcatgacaggggtgggtgtgg

SEQ ID NO: 5298 - DNA, 27 bp, Artificial Sequence
  source: /note="Description of Artificial Sequence: Synthetic oligonucleotide"
caagctccagggaagggactggagtgg

SEQ ID NO: 5299 - DNA, 31 bp, Artificial Sequence
  source: /note="Description of Artificial Sequence: Synthetic oligonucleotide"
caatgagactctagggaaggggctggaggga

SEQ ID NO: 5300 - DNA, 23 bp, Artificial Sequence
  source: /note="Description of Artificial Sequence: Synthetic oligonucleotide"
caccagggaagggcctggagtgg

SEQ ID NO: 5301 - DNA, 30 bp, Artificial Sequence
  source: /note="Description of Artificial Sequence: Synthetic oligonucleotide"
cacgagtccacatgggaaggactggagtgg

SEQ ID NO: 5302 - DNA, 30 bp, Artificial Sequence
  source: /note="Description of Artificial Sequence: Synthetic oligonucleotide"
cagcaggcttcatgacagggattggtgtgg

SEQ ID NO: 5303 - DNA, 24 bp, Artificial Sequence
  source: /note="Description of Artificial Sequence: Synthetic oligonucleotide"
cactagcccgcttccatgggctgt

SEQ ID NO: 5304 - DNA, 30 bp, Artificial Sequence
  source: /note="Description of Artificial Sequence: Synthetic oligonucleotide"
cagcaggcttcacaacagggattgtggtgg

SEQ ID NO: 5305 - DNA, 30 bp, Artificial Sequence; identical to SEQ ID NO: 5302
  source: /note="Description of Artificial Sequence: Synthetic oligonucleotide"

SEQ ID NO: 5306 - DNA, 27 bp, Artificial Sequence
  source: /note="Description of Artificial Sequence: Synthetic oligonucleotide"
caggcccatggacaagggcttgaggaa

SEQ ID NO: 5307 - DNA, 27 bp, Artificial Sequence
  source: /note="Description of Artificial Sequence: Synthetic oligonucleotide"
caggctccagggaacagactggagtgg

SEQ ID NO: 5308 - DNA, 27 bp, Artificial Sequence
  source: /note="Description of Artificial Sequence: Synthetic oligonucleotide"
caggcttctgggaaagggctggagtgg

SEQ ID NO: 5309 - DNA, 27 bp, Artificial Sequence
  source: /note="Description of Artificial Sequence: Synthetic oligonucleotide"
cagtccccatcgagaggccttgagtgg

SEQ ID NO: 5310 - DNA, 27 bp, Artificial Sequence
  source: /note="Description of Artificial Sequence: Synthetic oligonucleotide"
cagtcccctggacaagggcttgagtgg

SEQ ID NO: 5311 - DNA, 30 bp, Artificial Sequence
  source: /note="Description of Artificial Sequence: Synthetic oligonucleotide"
catcaggctcctgggaaagggctggagtag

SEQ ID NO: 5312 - DNA, 28 bp, Artificial Sequence
  source: /note="Description of Artificial Sequence: Synthetic oligonucleotide"
ccagatgcccgggaaagaactggagtgg

SEQ ID NO: 5313 - DNA, 31 bp, Artificial Sequence
  source: /note="Description of Artificial Sequence: Synthetic oligonucleotide"
ccagcacgcttcacaacaggaattggtgtgg

SEQ ID NO: 5314 - DNA, 31 bp, Artificial Sequence
  source: /note="Description of Artificial Sequence: Synthetic oligonucleotide"
ccagcacgcttcacaacagggataggtgtgg

SEQ ID NO: 5315 - DNA, 28 bp, Artificial Sequence
  source: /note="Description of Artificial Sequence: Synthetic oligonucleotide"
ccaggctccaggaaagggtttggagtgg

SEQ ID NO: 5316 - DNA, 22 bp, Artificial Sequence
  source: /note="Description of Artificial Sequence: Synthetic oligonucleotide"
cccagggaaggccctggagtgg

SEQ ID NO: 5317 - DNA, 22 bp, Artificial Sequence
  source: /note="Description of Artificial Sequence: Synthetic oligonucleotide"
cccagggaaggggctggagtgg

SEQ ID NO: 5318 - DNA, 23 bp, Artificial Sequence
  source: /note="Description of Artificial Sequence: Synthetic oligonucleotide"
ccccaggaaaggccctggagtgg

SEQ ID NO: 5319 - DNA, 23 bp, Artificial Sequence
  source: /note="Description of Artificial Sequence: Synthetic oligonucleotide"
ccccaggacaggggcttgagtgg

SEQ ID NO: 5320 - DNA, 23 bp, Artificial Sequence
  source: /note="Description of Artificial Sequence: Synthetic oligonucleotide"
ccccagggaagggactggagtgg

SEQ ID NO: 5321 - DNA, 23 bp, Artificial Sequence
  source: /note="Description of Artificial Sequence: Synthetic oligonucleotide"
ccccagggaaggggctggaatgg

SEQ ID NO: 5322 - DNA, 24 bp, Artificial Sequence
  source: /note="Description of Artificial Sequence: Synthetic oligonucleotide"
cccccagggaagggaatggagtgg

SEQ ID NO: 5323 - DNA, 24 bp, Artificial Sequence
  source: /note="Description of Artificial Sequence: Synthetic oligonucleotide"
ccccccaggaagggactggagtga

SEQ ID NO: 5324 - DNA, 23 bp, Artificial Sequence
  source: /note="Description of Artificial Sequence: Synthetic oligonucleotide"
cccccggacaagcgcttgagtgg

SEQ ID NO: 5325 - DNA, 26 bp, Artificial Sequence
  source: /note="Description of Artificial Sequence: Synthetic oligonucleotide"
cccctctctgggagggaatggagtgg

SEQ ID NO: 5326 - DNA, 24 bp, Artificial Sequence
  source: /note="Description of Artificial Sequence: Synthetic oligonucleotide"
cccgtgggcaacaggctggaatgg

SEQ ID NO: 5327 - DNA, 24 bp, Artificial Sequence
  source: /note="Description of Artificial Sequence: Synthetic oligonucleotide"
ccctcagcaaaggccctggagtgg

SEQ ID NO: 5328 - DNA, 23 bp, Artificial Sequence
  source: /note="Description of Artificial Sequence: Synthetic oligonucleotide"
ccgcaaggaagggactggagcga

SEQ ID NO: 5329 - DNA, 31 bp, Artificial Sequence
  source: /note="Description of Artificial Sequence: Synthetic oligonucleotide"
ccgccaagctacaggaaaaggtctggagtgg

SEQ ID NO: 5330 - DNA, 26 bp, Artificial Sequence
  source: /note="Description of Artificial Sequence: Synthetic oligonucleotide"
ccgccagtcctcagtcaagggagtgg

SEQ ID NO: 5331 - DNA, 20 bp, Artificial Sequence
  source: /note="Description of Artificial Sequence: Synthetic oligonucleotide"
ccgggaaggggctggagtgg

SEQ ID NO: 5332 - DNA, 28 bp, Artificial Sequence
  source: /note="Description of Artificial Sequence: Synthetic oligonucleotide"
ccgggcttcaagaaaggggctggaatgg

SEQ ID NO: 5333 - DNA, 21 bp, Artificial Sequence
  source: /note="Description of Artificial Sequence: Synthetic oligonucleotide"
ccggggaagggactggagcga

SEQ ID NO: 5334 - DNA, 38 bp, Artificial Sequence
  source: /note="Description of Artificial Sequence: Synthetic oligonucleotide"
cctggatccaccatctcccatcaaaaggtcttcagtgt

SEQ ID NO: 5335 - DNA, 30 bp, Artificial Sequence
  source: /note="Description of Artificial Sequence: Synthetic oligonucleotide"
cgccaggctccaagaaagggtttgtagtgg

SEQ ID NO: 5336 - DNA, 22 bp, Artificial Sequence
  source: /note="Description of Artificial Sequence: Synthetic oligonucleotide"
cgccgggaagggactggagtgg

SEQ ID NO: 5337 - DNA, 23 bp, Artificial Sequence
  source: /note="Description of Artificial Sequence: Synthetic oligonucleotide"
ctccaggcaaggggctggagtgg

SEQ ID NO: 5338 - DNA, 23 bp, Artificial Sequence
  source: /note="Description of Artificial Sequence: Synthetic oligonucleotide"
ctccagggaagggcctggagtgg

SEQ ID NO: 5339 - DNA, 23 bp, Artificial Sequence
  source: /note="Description of Artificial Sequence: Synthetic oligonucleotide"
ctccagggaaggggctggagtgg

SEQ ID NO: 5340 - DNA, 23 bp, Artificial Sequence
  source: /note="Description of Artificial Sequence: Synthetic oligonucleotide"
ctccagggaaggggctggtgtgg

SEQ ID NO: 5341 - DNA, 23 bp, Artificial Sequence
  source: /note="Description of Artificial Sequence: Synthetic oligonucleotide"
ctccagggaagggtccggagtgg

SEQ ID NO: 5342 - DNA, 25 bp, Artificial Sequence
  source: /note="Description of Artificial Sequence: Synthetic oligonucleotide"
ctccccagggaagggactggagtga

SEQ ID NO: 5343 - DNA, 23 bp, Artificial Sequence
  source: /note="Description of Artificial Sequence: Synthetic oligonucleotide"
ctccggagaaggggctggagtgg

SEQ ID NO: 5344 - DNA, 23 bp, Artificial Sequence
  source: /note="Description of Artificial Sequence: Synthetic oligonucleotide"
ctccggggaagggtctggagtgg

SEQ ID NO: 5345 - DNA, 23 bp, Artificial Sequence
  source: /note="Description of Artificial Sequence: Synthetic oligonucleotide"
ctgcaggcaaggggctggagtga

SEQ ID NO: 5346 - DNA, 31 bp, Artificial Sequence
  source: /note="Description of Artificial Sequence: Synthetic oligonucleotide"
ctgcttgcccctagaagatggacaggagtgg

SEQ ID NO: 5347 - DNA, 20 bp, Artificial Sequence
  source: /note="Description of Artificial Sequence: Synthetic oligonucleotide"
ctgggaaggcgctggggcac

SEQ ID NO: 5348 - DNA, 23 bp, Artificial Sequence
  source: /note="Description of Artificial Sequence: Synthetic oligonucleotide"
ctgggggacagaggctggagtgg

SEQ ID NO: 5349 - DNA, 32 bp, Artificial Sequence
  source: /note="Description of Artificial Sequence: Synthetic oligonucleotide"
ctgtaggcactggatggaaagcacaggagtgg

SEQ ID NO: 5350 - DNA, 29 bp, Artificial Sequence
  source: /note="Description of Artificial Sequence: Synthetic oligonucleotide"
gacaggctcctggaaaagggcttgagtgg

SEQ ID NO: 5351 - DNA, 29 bp, Artificial Sequence
  source: /note="Description of Artificial Sequence: Synthetic oligonucleotide"
gatccgccagtcctcagtcaagggagtgg

SEQ ID NO: 5352 - DNA, 25 bp, Artificial Sequence
  source: /note="Description of Artificial Sequence: Synthetic oligonucleotide"
gatgcccgggaaaggcttggagtgg

SEQ ID NO: 5353 - DNA, 28 bp, Artificial Sequence
  source: /note="Description of Artificial Sequence: Synthetic oligonucleotide"
gcaggcttcatgacaggggtgggtgtag

SEQ ID NO: 5354 - DNA, 29 bp, Artificial Sequence
  source: /note="Description of Artificial Sequence: Synthetic oligonucleotide"
gccaggctccagggaagggactggaatat

SEQ ID NO: 5355 - DNA, 25 bp, Artificial Sequence
  source: /note="Description of Artificial Sequence: Synthetic oligonucleotide"
gcccccatgggaggtactggagtgg

SEQ ID NO: 5356 - DNA, 24 bp, Artificial Sequence
  source: /note="Description of Artificial Sequence: Synthetic oligonucleotide"
gcccccggacaaaggcttgagtgg

SEQ ID NO: 5357 - DNA, 24 bp, Artificial Sequence
  source: /note="Description of Artificial Sequence: Synthetic oligonucleotide"
gcccctggacaagggcttgagtgg

SEQ ID NO: 5358 - DNA, 22 bp, Artificial Sequence
  source: /note="Description of Artificial Sequence: Synthetic oligonucleotide"
gcccgggaaaggcctggagtgg

SEQ ID NO: 5359 - DNA, 24 bp, Artificial Sequence
  source: /note="Description of Artificial Sequence: Synthetic oligonucleotide"
gcctcagggaaggggctggaatgg

SEQ ID NO: 5360 - DNA, 24 bp, Artificial Sequence
  source: /note="Description of Artificial Sequence: Synthetic oligonucleotide"
gctccaggaaaggggctgcagtga

SEQ ID NO: 5361 - DNA, 24 bp, Artificial Sequence
  source: /note="Description of Artificial Sequence: Synthetic oligonucleotide"
gctccaggaaaggggctggagtgg

SEQ ID NO: 5362 - DNA, 24 bp, Artificial Sequence
  source: /note="Description of Artificial Sequence: Synthetic oligonucleotide"
gctccagggaagggtctgcagtgg

SEQ ID NO: 5363 - DNA, 24 bp, Artificial Sequence
  source: /note="Description of Artificial Sequence: Synthetic oligonucleotide"
gctctcagggaggggctgcaatgg

SEQ ID NO: 5364 - DNA, 24 bp, Artificial Sequence
  source: /note="Description of Artificial Sequence: Synthetic oligonucleotide"
gctggaggagaggggctggagtgg

SEQ ID NO: 5365 - DNA, 24 bp, Artificial Sequence
  source: /note="Description of Artificial Sequence: Synthetic oligonucleotide"
gcttccgggaaagggctggagtgg

SEQ ID NO: 5366 - DNA, 25 bp, Artificial Sequence
  source: /note="Description of Artificial Sequence: Synthetic oligonucleotide"
ggccactggacaagggcttgagtgg

SEQ ID NO: 5367 - DNA, 25 bp, Artificial Sequence
  source: /note="Description of Artificial Sequence: Synthetic oligonucleotide"
ggcccatgcacaagggcttgagtgg

SEQ ID NO: 5368 - DNA, 25 bp, Artificial Sequence
  source: /note="Description of Artificial Sequence: Synthetic oligonucleotide"
ggcccctggaaaagggcttgagtgg

SEQ ID NO: 5369 - DNA, 25 bp, Artificial Sequence
  source: /note="Description of Artificial Sequence: Synthetic oligonucleotide"
ggcccctggacaagggcttgaaagg

SEQ ID NO: 5370 - DNA, 25 bp, Artificial Sequence
  source: /note="Description of Artificial Sequence: Synthetic oligonucleotide"
ggctccagggaagggtctggagtgg

SEQ ID NO: 5371 - DNA, 25 bp, Artificial Sequence
  source: /note="Description of Artificial Sequence: Synthetic oligonucleotide"
ggctcgtggacaacgccttgagtgg

SEQ ID NO: 5372 - DNA, 24 bp, Artificial Sequence
  source: /note="Description of Artificial Sequence: Synthetic oligonucleotide"
gggccctggacaagggcatagtgg

SEQ ID NO: 5373 - DNA, 33 bp, Artificial Sequence
  source: /note="Description of Artificial Sequence: Synthetic oligonucleotide"
gtccagcaggattcatggcaagtgttggtgagg

SEQ ID NO: 5374 - DNA, 33 bp, Artificial Sequence
  source: /note="Description of Artificial Sequence: Synthetic oligonucleotide"
gtgtgacaggcccctggataagggtttgaatgg

SEQ ID NO: 5375 - DNA, 32 bp, Artificial Sequence
  source: /note="Description of Artificial Sequence: Synthetic oligonucleotide"
tccagcaggcttcatgacagggatttgtgtgg

SEQ ID NO: 5376 - DNA, 22 bp, Artificial Sequence
  source: /note="Description of Artificial Sequence: Synthetic oligonucleotide"
tcccgggaaggggctggaatgg

SEQ ID NO: 5377 - DNA, 24 bp, Artificial Sequence
  source: /note="Description of Artificial Sequence: Synthetic oligonucleotide"
tctccaggcaaggggctggagtga

SEQ ID NO: 5378 - DNA, 30 bp, Artificial Sequence
  source: /note="Description of Artificial Sequence: Synthetic oligonucleotide"
tgatagacccctggacagggctttgagtgg

SEQ ID NO: 5379 - DNA, 31 bp, Artificial Sequence
  source: /note="Description of Artificial Sequence: Synthetic oligonucleotide"
tgtgacaaagccctggacaagggcatagtgg

SEQ ID NO: 5380 - DNA, 25 bp, Artificial Sequence
  source: /note="Description of Artificial Sequence: Synthetic oligonucleotide"
cacctgaggagacggtgaccagggt

SEQ ID NO: 5381 - DNA, 28 bp, Artificial Sequence
  source: /note="Description of Artificial Sequence: Synthetic oligonucleotide"
actcacctgaggagacagtgaccagggt

SEQ ID NO: 5382 - DNA, 37 bp, Artificial Sequence
  source: /note="Description of Artificial Sequence: Synthetic oligonucleotide"
ggaaagccatcttacctgaagagacggtgaccattgt

SEQ ID NO: 5383 - DNA, 28 bp, Artificial Sequence
  source: /note="Description of Artificial Sequence: Synthetic oligonucleotide"
tcttacctgaggagacggtgaccgtggt

SEQ ID NO: 5384 - DNA, 20 bp, Artificial Sequence
  source: /note="Description of Artificial Sequence: Synthetic oligonucleotide"
gtggctgcggtctccagggc

SEQ ID NO: 5385 - DNA, 18 bp, Artificial Sequence
  source: /note="Description of Artificial Sequence: Synthetic oligonucleotide"
ggagacggtggccgggct

SEQ ID NO: 5386 - DNA, 24 bp, Artificial Sequence
  source: /note="Description of Artificial Sequence: Synthetic oligonucleotide"
gcctgacccctcagaagccagacc

SEQ ID NO: 5387 - DNA, 103 bp, Artificial Sequence
  source: /note="Description of Artificial Sequence: Synthetic polynucleotide"
  modified_base (67)..(72): a, c, t, or g
aatgatacggcgaccaccgagatctacaccggtctcggcattcctgctgaaccgctcttccgatctnnnnnncaaggtcaccgggagctgcatgtgtcagagg

SEQ ID NO: 5388 - DNA, 103 bp, Artificial Sequence
  source: /note="Description of Artificial Sequence: Synthetic polynucleotide"
  modified_base (67)..(72): a, c, t, or g
aatgatacggcgaccaccgagatctacaccggtctcggcattcctgctgaaccgctcttccgatctnnnnnngcataactccgggagctgcatgtgtcagagg

SEQ ID NO: 5389 - DNA, 103 bp, Artificial Sequence
  source: /note="Description of Artificial Sequence: Synthetic polynucleotide"
  modified_base (67)..(72): a, c, t, or g
aatgatacggcgaccaccgagatctacaccggtctcggcattcctgctgaaccgctcttccgatctnnnnnnctctgattccgggagctgcatgtgtcagagg

SEQ ID NO: 5390 - DNA, 103 bp, Artificial Sequence
  source: /note="Description of Artificial Sequence: Synthetic polynucleotide"
  modified_base (67)..(72): a, c, t, or g
aatgatacggcgaccaccgagatctacaccggtctcggcattcctgctgaaccgctcttccgatctnnnnnntacgtacgccgggagctgcatgtgtcagagg

SEQ ID NO: 5391 - DNA, 103 bp, Artificial Sequence
  source: /note="Description of Artificial Sequence: Synthetic polynucleotide"
  modified_base (67)..(72): a, c, t, or g
aatgatacggcgaccaccgagatctacaccggtctcggcattcctgctgaaccgctcttccgatctnnnnnntacgcgttccgggagctgcatgtgtcagagg

SEQ ID NO: 5392 - DNA, 103 bp, Artificial Sequence
  source: /note="Description of Artificial Sequence: Synthetic polynucleotide"
  modified_base (67)..(72): a, c, t, or g
aatgatacggcgaccaccgagatctacaccggtctcggcattcctgctgaaccgctcttccgatctnnnnnnctcagtgaccgggagctgcatgtgtcagagg

SEQ ID NO: 5393 - DNA, 103 bp, Artificial Sequence
  source: /note="Description of Artificial Sequence: Synthetic polynucleotide"
  modified_base (67)..(72): a, c, t, or g
aatgatacggcgaccaccgagatctacaccggtctcggcattcctgctgaaccgctcttccgatctnnnnnntctgatatccgggagctgcatgtgtcagagg

SEQ ID NO: 5394 - DNA, 103 bp, Artificial Sequence
  source: /note="Description of Artificial Sequence: Synthetic polynucleotide"
  modified_base (67)..(72): a, c, t, or g
aatgatacggcgaccaccgagatctacaccggtctcggcattcctgctgaaccgctcttccgatctnnnnnncatatgctccgggagctgcatgtgtcagagg

SEQ ID NO: 5395 - DNA, 103 bp, Artificial Sequence
  source: /note="Description of Artificial Sequence: Synthetic polynucleotide"
  modified_base (67)..(72): a, c, t, or g
aatgatacggcgaccaccgagatctacaccggtctcggcattcctgctgaaccgctcttccgatctnnnnnncgtaattaccgggagctgcatgtgtcagagg

SEQ ID NO: 5396 - DNA, 103 bp, Artificial Sequence
  source: /note="Description of Artificial Sequence: Synthetic polynucleotide"
  modified_base (67)..(72): a, c, t, or g
aatgatacggcgaccaccgagatctacaccggtctcggcattcctgctgaaccgctcttccgatctnnnnnnacgtactcccgggagctgcatgtgtcagagg

SEQ ID NO: 5397 - DNA, 103 bp, Artificial Sequence
  source: /note="Description of Artificial Sequence: Synthetic polynucleotide"
  modified_base (67)..(72): a, c, t, or g
aatgatacggcgaccaccgagatctacaccggtctcggcattcctgctgaaccgctcttccgatctnnnnnncttctaagccgggagctgcatgtgtcagagg

SEQ ID NO: 5398 - DNA, 103 bp, Artificial Sequence
  source: /note="Description of Artificial Sequence: Synthetic polynucleotide"
  modified_base (67)..(72): a, c, t, or g
aatgatacggcgaccaccgagatctacaccggtctcggcattcctgctgaaccgctcttccgatctnnnnnnactatgacccgggagctgcatgtgtcagagg

SEQ ID NO: 5399 - DNA, 103 bp, Artificial Sequence
  source: /note="Description of Artificial Sequence: Synthetic polynucleotide"
  modified_base (67)..(72): a, c, t, or g
aatgatacggcgaccaccgagatctacaccggtctcggcattcctgctgaaccgctcttccgatctnnnnnngacgttaaccgggagctgcatgtgtcagagg

SEQ ID NO: 5400 - DNA, 103 bp, Artificial Sequence
  source: /note="Description of Artificial Sequence: Synthetic polynucleotide"
  modified_base (67)..(72): a, c, t, or g
aatgatacggcgaccaccgagatctacaccggtctcggcattcctgctgaaccgctcttccgatctnnnnnnacaagataccgggagctgcatgtgtcagagg

SEQ ID NO: 5401 - DNA, 103 bp, Artificial Sequence
  source: /note="Description of Artificial Sequence: Synthetic polynucleotide"
  modified_base (67)..(72): a, c, t, or g
aatgatacggcgaccaccgagatctacaccggtctcggcattcctgctgaaccgctcttccgatctnnnnnngactaagaccgggagctgcatgtgtcagagg

SEQ ID NO: 5402 - DNA, 103 bp, Artificial Sequence
  source: /note="Description of Artificial Sequence: Synthetic polynucleotide"
  modified_base (67)..(72): a, c, t, or g
aatgatacggcgaccaccgagatctacaccggtctcggcattcctgctgaaccgctcttccgatctnnnnnngtgtctacccgggagctgcatgtgtcagagg

SEQ ID NO: 5403 - DNA, 103 bp, Artificial Sequence
  source: /note="Description of Artificial Sequence: Synthetic polynucleotide"
  modified_base (67)..(72): a, c, t, or g
aatgatacggcgaccaccgagatctacaccggtctcggcattcctgctgaaccgctcttccgatctnnnnnnttcactagccgggagctgcatgtgtcagagg

SEQ ID NO: 5404 - DNA, 103 bp, Artificial Sequence
  source: /note="Description of Artificial Sequence: Synthetic polynucleotide"
  modified_base (67)..(72): a, c, t, or g
aatgatacggcgaccaccgagatctacaccggtctcggcattcctgctgaaccgctcttccgatctnnnnnnaatcggatccgggagctgcatgtgtcagagg

SEQ ID NO: 5405 - DNA, 103 bp, Artificial Sequence
  source: /note="Description of Artificial Sequence: Synthetic polynucleotide"
  modified_base (67)..(72): a, c, t, or g
aatgatacggcgaccaccgagatctacaccggtctcggcattcctgctgaaccgctcttccgatctnnnnnnagtaccgaccgggagctgcatgtgtcagagg

SEQ ID NO: 5406 - DNA, 103 bp, Artificial Sequence
  source: /note="Description of Artificial Sequence: Synthetic polynucleotide"
  modified_base (67)..(72): a, c, t, or g
aatgatacggcgaccaccgagatctacaccggtctcggcattcctgctgaaccgctcttccgatctnnnnnnttgcctcaccgggagctgcatgtgtcagagg

SEQ ID NO: 5407 - DNA, 103 bp, Artificial Sequence
  source: /note="Description of Artificial Sequence: Synthetic polynucleotide"
  modified_base (67)..(72): a, c, t, or g
aatgatacggcgaccaccgagatctacaccggtctcggcattcctgctgaaccgctcttccgatctnnnnnntcgttagcccgggagctgcatgtgtcagagg

SEQ ID NO: 5408 - DNA, 103 bp, Artificial Sequence
  source: /note="Description of Artificial Sequence: Synthetic polynucleotide"
  modified_base (67)..(72): a, c, t, or g
aatgatacggcgaccaccgagatctacaccggtctcggcattcctgctgaaccgctcttccgatctnnnnnntatagttcccgggagctgcatgtgtcagagg

SEQ ID NO: 5409 - DNA, 103 bp, Artificial Sequence
  source: /note="Description of Artificial Sequence: Synthetic polynucleotide"
  modified_base (67)..(72): a, c, t, or g
aatgatacggcgaccaccgagatctacaccggtctcggcattcctgctgaaccgctcttccgatctnnnnnntggcgtatccgggagctgcatgtgtcagagg

SEQ ID NO: 5410 - DNA, 103 bp, Artificial Sequence
  source: /note="Description of Artificial Sequence: Synthetic polynucleotide"
  modified_base (67)..(72): a, c, t, or g
aatgatacggcgaccaccgagatctacaccggtctcggcattcctgctgaaccgctcttccgatctnnnnnntggacatgccgggagctgcatgtgtcagagg

SEQ ID NO: 5411 - DNA, 103 bp, Artificial Sequence
  source: /note="Description of Artificial Sequence: Synthetic polynucleotide"
  modified_base (67)..(72): a, c, t, or g
aatgatacggcgaccaccgagatctacaccggtctcggcattcctgctgaaccgctcttccgatctnnnnnnaggttgctccgggagctgcatgtgtcagagg

SEQ ID NO: 5412 - DNA, 103 bp, Artificial Sequence
  source: /note="Description of Artificial Sequence: Synthetic polynucleotide"
  modified_base (67)..(72): a, c, t, or g
aatgatacggcgaccaccgagatctacaccggtctcggcattcctgctgaaccgctcttccgatctnnnnnnatatgctgccgggagctgcatgtgtcagagg

SEQ ID NO: 5413 - DNA, 103 bp, Artificial Sequence
  source: /note="Description of Artificial Sequence: Synthetic polynucleotide"
  modified_base (67)..(72): a, c, t, or g
aatgatacggcgaccaccgagatctacaccggtctcggcattcctgctgaaccgctcttccgatctnnnnnngtacagtgccgggagctgcatgtgtcagagg

SEQ ID NO: 5414 - DNA, 103 bp, Artificial Sequence
  source: /note="Description of Artificial Sequence: Synthetic polynucleotide"
  modified_base (67)..(72): a, c, t, or g
aatgatacggcgaccaccgagatctacaccggtctcggcattcctgctgaaccgctcttccgatctnnnnnnatccatggccgggagctgcatgtgtcagagg

SEQ ID NO: 5415 - DNA, 103 bp, Artificial Sequence
  source: /note="Description of Artificial Sequence: Synthetic polynucleotide"
  modified_base (67)..(72): a, c, t, or g
aatgatacggcgaccaccgagatctacaccggtctcggcattcctgctgaaccgctcttccgatctnnnnnntgatgcgaccgggagctgcatgtgtcagagg

SEQ ID NO: 5416 - DNA, 103 bp, Artificial Sequence
  source: /note="Description of Artificial Sequence: Synthetic polynucleotide"
  modified_base (67)..(72): a, c, t, or g
aatgatacggcgaccaccgagatctacaccggtctcggcattcctgctgaaccgctcttccgatctnnnnnngtagcagtccgggagctgcatgtgtcagagg

SEQ ID NO: 5417 - DNA, 103 bp, Artificial Sequence
  source: /note="Description of Artificial Sequence: Synthetic polynucleotide"
  modified_base (67)..(72): a, c, t, or g
aatgatacggcgaccaccgagatctacaccggtctcggcattcctgctgaaccgctcttccgatctnnnnnnggatcatcccgggagctgcatgtgtcagagg

SEQ ID NO: 5418 - DNA, 103 bp, Artificial Sequence
  source: /note="Description of Artificial Sequence: Synthetic polynucleotide"
  modified_base (67)..(72): a, c, t, or g
aatgatacggcgaccaccgagatctacaccggtctcggcattcctgctgaaccgctcttccgatctnnnnnngtgaacgtccgggagctgcatgtgtcagagg

SEQ ID NO: 5419 - DNA, 103 bp, Artificial Sequence
  source: /note="Description of Artificial Sequence: Synthetic polynucleotide"
  modified_base (67)..(72): a, c, t, or g
aatgatacggcgaccaccgagatctacaccggtctcggcattcctgctgaaccgctcttccgatctnnnnnnattaagcgccgggagctgcatgtgtcagagg

SEQ ID NO: 5420 - DNA, 103 bp, Artificial Sequence
  source: /note="Description of Artificial Sequence: Synthetic polynucleotide"
  modified_base (67)..(72): a, c, t, or g
aatgatacggcgaccaccgagatctacaccggtctcggcattcctgctgaaccgctcttccgatctnnnnnntattggcgccgggagctgcatgtgtcagagg

SEQ ID NO: 5421 - DNA, 103 bp, Artificial Sequence
  source: /note="Description of Artificial Sequence: Synthetic polynucleotide"
  modified_base (67)..(72): a, c, t, or g
aatgatacggcgaccaccgagatctacaccggtctcggcattcctgctgaaccgctcttccgatctnnnnnncgattacaccgggagctgcatgtgtcagagg

SEQ ID NO: 5422 - DNA, 103 bp, Artificial Sequence
  source: /note="Description of Artificial Sequence: Synthetic polynucleotide"
  modified_base (67)..(72): a, c, t, or g
aatgatacggcgaccaccgagatctacaccggtctcggcattcctgctgaaccgctcttccgatctnnnnnntgtcatcgccgggagctgcatgtgtcagagg

SEQ ID NO: 5423 - DNA, 103 bp, Artificial Sequence
  source: /note="Description of Artificial Sequence: Synthetic polynucleotide"
  modified_base (67)..(72): a, c, t, or g
aatgatacggcgaccaccgagatctacaccggtctcggcattcctgctgaaccgctcttccgatctnnnnnntatcaagtccgggagctgcatgtgtcagagg

SEQ ID NO: 5424 - DNA, 103 bp, Artificial Sequence
  source: /note="Description of Artificial Sequence: Synthetic polynucleotide"
  modified_base (67)..(72): a, c, t, or g
aatgatacggcgaccaccgagatctacaccggtctcggcattcctgctgaaccgctcttccgatctnnnnnnaggcttgaccgggagctgcatgtgtcagagg

SEQ ID NO: 5425 - DNA, 103 bp, Artificial Sequence
  source: /note="Description of Artificial Sequence: Synthetic polynucleotide"
  modified_base (67)..(72): a, c, t, or g
aatgatacggcgaccaccgagatctacaccggtctcggcattcctgctgaaccgctcttccgatctnnnnnngataaccaccgggagctgcatgtgtcagagg

SEQ ID NO: 5426 - DNA, 103 bp, Artificial Sequence
  source: /note="Description of Artificial Sequence: Synthetic polynucleotide"
  modified_base (67)..(72): a, c, t, or g
aatgatacggcgaccaccgagatctacaccggtctcggcattcctgctgaaccgctcttccgatctnnnnnnaatcctgcccgggagctgcatgtgtcagagg

SEQ ID NO: 5427 - DNA, 103 bp, Artificial Sequence
  source: /note="Description of Artificial Sequence: Synthetic polynucleotide"
  modified_base (67)..(72): a, c, t, or g
aatgatacggcgaccaccgagatctacaccggtctcggcattcctgctgaaccgctcttccgatctnnnnnngttatatcccgggagctgcatgtgtcagagg

SEQ ID NO: 5428 - DNA, 103 bp, Artificial Sequence
  source: /note="Description of Artificial Sequence: Synthetic polynucleotide"
  modified_base (67)..(72): a, c, t, or g
aatgatacggcgaccaccgagatctacaccggtctcggcattcctgctgaaccgctcttccgatctnnnnnnacacacgtccgggagctgcatgtgtcagagg

SEQ ID NO: 5429 - DNA, 103 bp, Artificial Sequence
  source: /note="Description of Artificial Sequence: Synthetic polynucleotide"
  modified_base (67)..(72): a, c, t, or g
aatgatacggcgaccaccgagatctacaccggtctcggcattcctgctgaaccgctcttccgatctnnnnnnatacgactccgggagctgcatgtgtcagagg

SEQ ID NO: 5430 - DNA, 103 bp, Artificial Sequence
  source: /note="Description of Artificial Sequence: Synthetic polynucleotide"
  modified_base (67)..(72): a, c, t, or g
aatgatacggcgaccaccgagatctacaccggtctcggcattcctgctgaaccgctcttccgatctnnnnnnatcttcgtccgggagctgcatgtgtcagagg

SEQ ID NO: 5431 - DNA, 103 bp, Artificial Sequence
  source: /note="Description of Artificial Sequence: Synthetic polynucleotide"
  modified_base (67)..(72): a, c, t, or g
aatgatacggcgaccaccgagatctacaccggtctcggcattcctgctgaaccgctcttccgatctnnnnnnacatgtatccgggagctgcatgtgtcagagg

SEQ ID NO: 5432 - DNA, 103 bp, Artificial Sequence
  source: /note="Description of Artificial Sequence: Synthetic polynucleotide"
  modified_base (67)..(72): a, c, t, or g
aatgatacggcgaccaccgagatctacaccggtctcggcattcctgctgaaccgctcttccgatctnnnnnntccacagtccgggagctgcatgtgtcagagg

SEQ ID NO: 5433 - DNA, 103 bp, Artificial Sequence
  source: /note="Description of Artificial Sequence: Synthetic polynucleotide"
  modified_base (67)..(72): a, c, t, or g
aatgatacggcgaccaccgagatctacaccggtctcggcattcctgctgaaccgctcttccgatctnnnnnncagtctgtccgggagctgcatgtgtcagagg

SEQ ID NO: 5434 - DNA, 103 bp, Artificial Sequence
  source: /note="Description of Artificial Sequence: Synthetic polynucleotide"
  modified_base (67)..(72): a, c, t, or g
aatgatacggcgaccaccgagatctacaccggtctcggcattcctgctgaaccgctcttccgatctnnnnnntccatgtgccgggagctgcatgtgtcagagg

SEQ ID NO: 5435 - DNA, 103 bp, Artificial Sequence
  source: /note="Description of Artificial Sequence: Synthetic polynucleotide"
  modified_base (67)..(72): a, c, t, or g
aatgatacggcgaccaccgagatctacaccggtctcggcattcctgctgaaccgctcttccgatctnnnnnntcactgcaccgggagctgcatgtgtcagagg

SEQ ID NO: 5436 - DNA, 103 bp, Artificial Sequence
  source: /note="Description of Artificial Sequence: Synthetic polynucleotide"
  modified_base (67)..(72): a, c, t, or g
aatgatacggcgaccaccgagatctacaccggtctcggcattcctgctgaaccgctcttccgatctnnnnnnatggtcaaccgggagctgcatgtgtcagagg

SEQ ID NO: 5437 - DNA, 103 bp, Artificial Sequence
  source: /note="Description of Artificial Sequence: Synthetic polynucleotide"
  modified_base (67)..(72): a, c, t, or g
aatgatacggcgaccaccgagatctacaccggtctcggcattcctgctgaaccgctcttccgatctnnnnnncaagtcacccgggagctgcatgtgtcagagg

SEQ ID NO: 5438 - DNA, 103 bp, Artificial Sequence
  source: /note="Description of Artificial Sequence: Synthetic polynucleotide"
  modified_base (67)..(72): a, c, t, or g
aatgatacggcgaccaccgagatctacaccggtctcggcattcctgctgaaccgctcttccgatctnnnnnntagacggaccgggagctgcatgtgtcagagg

SEQ ID NO: 5439 - DNA, 103 bp, Artificial Sequence
  source: /note="Description of Artificial Sequence: Synthetic polynucleotide"
  modified_base (67)..(72): a, c, t, or g
aatgatacggcgaccaccgagatctacaccggtctcggcattcctgctgaaccgctcttccgatctnnnnnncagctcttccgggagctgcatgtgtcagagg

SEQ ID NO: 5440 - DNA, 103 bp, Artificial Sequence
  source: /note="Description of Artificial Sequence: Synthetic polynucleotide"
  modified_base (67)..(72): a, c, t, or g
aatgatacggcgaccaccgagatctacaccggtctcggcattcctgctgaaccgctcttccgatctnnnnnngagcgataccgggagctgcatgtgtcagagg

SEQ ID NO: 5441 - DNA, 103 bp, Artificial Sequence
  source: /note="Description of Artificial Sequence: Synthetic polynucleotide"
  modified_base (67)..(72): a, c, t, or g
aatgatacggcgaccaccgagatctacaccggtctcggcattcctgctgaaccgctcttccgatctnnnnnnctcgagaaccgggagctgcatgtgtcagagg

SEQ ID NO: 5442 - DNA, 103 bp, Artificial Sequence
  source: /note="Description of Artificial Sequence: Synthetic polynucleotide"
  modified_base (67)..(72): a, c, t, or g
aatgatacggcgaccaccgagatctacaccggtctcggcattcctgctgaaccgctcttccgatctnnnnnnatgacaccccgggagctgcatgtgtcagagg

SEQ ID NO: 5443 - DNA, 103 bp, Artificial Sequence
  source: /note="Description of Artificial Sequence: Synthetic polynucleotide"
  modified_base (67)..(72): a, c, t, or g
aatgatacggcgaccaccgagatctacaccggtctcggcattcctgctgaaccgctcttccgatctnnnnnncttcacgaccgggagctgcatgtgtcagagg

SEQ ID NO: 5444 - DNA, 103 bp, Artificial Sequence
  source: /note="Description of Artificial Sequence: Synthetic polynucleotide"
  modified_base (67)..(72): a, c, t, or g
aatgatacggcgaccaccgagatctacaccggtctcggcattcctgctgaaccgctcttccgatctnnnnnnctataaggccgggagctgcatgtgtcagagg

SEQ ID NO: 5445 - DNA, 103 bp, Artificial Sequence
  source: /note="Description of Artificial Sequence: Synthetic polynucleotide"
  modified_base (67)..(72): a, c, t, or g
aatgatacggcgaccaccgagatctacaccggtctcggcattcctgctgaaccgctcttccgatctnnnnnncgtagagtccgggagctgcatgtgtcagagg

SEQ ID NO: 5446 - DNA, 103 bp, Artificial Sequence
  source: /note="Description of Artificial Sequence: Synthetic polynucleotide"
  modified_base (67)..(72): a, c, t, or g
aatgatacggcgaccaccgagatctacaccggtctcggcattcctgctgaaccgctcttccgatctnnnnnnatagatacccgggagctgcatgtgtcagagg

SEQ ID NO: 5447 - DNA, 103 bp, Artificial Sequence
  source: /note="Description of Artificial Sequence: Synthetic polynucleotide"
  modified_base (67)..(72): a, c, t, or g
aatgatacggcgaccaccgagatctacaccggtctcggcattcctgctgaaccgctcttccgatctnnnnnntcgtcgatccgggagctgcatgtgtcagagg

SEQ ID NO: 5448 - DNA, 103 bp, Artificial Sequence
  source: /note="Description of Artificial Sequence: Synthetic polynucleotide"
  modified_base (67)..(72): a, c, t, or g
aatgatacggcgaccaccgagatctacaccggtctcggcattcctgctgaaccgctcttccgatctnnnnnntaagaatcccgggagctgcatgtgtcagagg

SEQ ID NO: 5449 - DNA, 103 bp, Artificial Sequence
  source: /note="Description of Artificial Sequence: Synthetic polynucleotide"
  modified_base (67)..(72): a, c, t, or g
aatgatacggcgaccaccgagatctacaccggtctcggcattcctgctgaaccgctcttccgatctnnnnnnaatgacagccgggagctgcatgtgtcagagg

SEQ ID NO: 5450 - DNA, 103 bp, Artificial Sequence
  source: /note="Description of Artificial Sequence: Synthetic polynucleotide"
  modified_base (67)..(72): a, c, t, or g
aatgatacggcgaccaccgagatctacaccggtctcggcattcctgctgaaccgctcttccgatctnnnnnnagctagtgccgggagctgcatgtgtcagagg

SEQ ID NO: 5451 - DNA, 103 bp, Artificial Sequence
  source: /note="Description of Artificial Sequence: Synthetic polynucleotide"
  modified_base (67)..(72): a, c, t, or g
aatgatacggcgaccaccgagatctacaccggtctcggcattcctgctgaaccgctcttccgatctnnnnnntgagacctccgggagctgcatgtgtcagagg

SEQ ID NO: 5452 - DNA, 103 bp, Artificial Sequence
  source: /note="Description of Artificial Sequence: Synthetic polynucleotide"
  modified_base (67)..(72): a, c, t, or g
aatgatacggcgaccaccgagatctacaccggtctcggcattcctgctgaaccgctcttccgatctnnnnnnagcgtaatccgggagctgcatgtgtcagagg

SEQ ID NO: 5453 - DNA, 103 bp, Artificial Sequence
  source: /note="Description of Artificial Sequence: Synthetic polynucleotide"
  modified_base (67)..(72): a, c, t, or g
aatgatacggcgaccaccgagatctacaccggtctcggcattcctgctgaaccgctcttccgatctnnnnnntaaccaagccgggagctgcatgtgtcagagg

SEQ ID NO: 5454 - DNA, 103 bp, Artificial Sequence
  source: /note="Description of Artificial Sequence: Synthetic polynucleotide"
  modified_base (67)..(72): a, c, t, or g
aatgatacggcgaccaccgagatctacaccggtctcggcattcctgctgaaccgctcttccgatctnnnnnngatggcttccgggagctgcatgtgtcagagg

SEQ ID NO: 5455 - DNA, 103 bp, Artificial Sequence
  source: /note="Description of Artificial Sequence: Synthetic polynucleotide"
  modified_base (67)..(72): a, c, t, or g
aatgatacggcgaccaccgagatctacaccggtctcggcattcctgctgaaccgctcttccgatctnnnnnngcatctgaccgggagctgcatgtgtcagagg

SEQ ID NO: 5456 - DNA, 103 bp, Artificial Sequence
  source: /note="Description of Artificial Sequence: Synthetic polynucleotide"
  modified_base (67)..(72): a, c, t, or g
aatgatacggcgaccaccgagatctacaccggtctcggcattcctgctgaaccgctcttccgatctnnnnnnttccggtaccgggagctgcatgtgtcagagg

SEQ ID NO: 5457 - DNA, 103 bp, Artificial Sequence
  source: /note="Description of Artificial Sequence: Synthetic polynucleotide"
  modified_base (67)..(72): a, c, t, or g
aatgatacggcgaccaccgagatctacaccggtctcggcattcctgctgaaccgctcttccgatctnnnnnngacactctccgggagctgcatgtgtcagagg

SEQ ID NO: 5458 - DNA, 103 bp, Artificial Sequence
  source: /note="Description of Artificial Sequence: Synthetic polynucleotide"
  modified_base (67)..(72): a, c, t, or g
aatgatacggcgaccaccgagatctacaccggtctcggcattcctgctgaaccgctcttccgatctnnnnnnttaagcatccgggagctgcatgtgtcagagg

SEQ ID NO: 5459 - DNA, 103 bp, Artificial Sequence
  source: /note="Description of Artificial Sequence: Synthetic polynucleotide"
  modified_base (67)..(72): a, c, t, or g
aatgatacggcgaccaccgagatctacaccggtctcggcattcctgctgaaccgctcttccgatctnnnnnntgctacacccgggagctgcatgtgtcagagg

SEQ ID NO: 5460 - DNA, 103 bp, Artificial Sequence
  source: /note="Description of Artificial Sequence: Synthetic polynucleotide"
  modified_base (67)..(72): a, c, t, or g
aatgatacggcgaccaccgagatctacaccggtctcggcattcctgctgaaccgctcttccgatctnnnnnntcagcttgccgggagctgcatgtgtcagagg

SEQ ID NO: 5461 - DNA, 103 bp, Artificial Sequence
  source: /note="Description of Artificial Sequence: Synthetic polynucleotide"
  modified_base (67)..(72): a, c, t, or g
aatgatacggcgaccaccgagatctacaccggtctcggcattcctgctgaaccgctcttccgatctnnnnnncatgtagaccgggagctgcatgtgtcagagg

SEQ ID NO: 5462 - DNA, 103 bp, Artificial Sequence
  source: /note="Description of Artificial Sequence: Synthetic polynucleotide"
  modified_base (67)..(72): a, c, t, or g
aatgatacggcgaccaccgagatctacaccggtctcggcattcctgctgaaccgctcttccgatctnnnnnnttcggaacccgggagctgcatgtgtcagagg

SEQ ID NO: 5463 - DNA, 103 bp, Artificial Sequence
  source: /note="Description of Artificial Sequence: Synthetic polynucleotide"
  modified_base (67)..(72): a, c, t, or g
aatgatacggcgaccaccgagatctacaccggtctcggcattcctgctgaaccgctcttccgatctnnnnnngcaattcgccgggagctgcatgtgtcagagg

SEQ ID NO: 5464 - DNA, 103 bp, Artificial Sequence
  source: /note="Description of Artificial Sequence: Synthetic polynucleotide"
  modified_base (67)..(72): a, c, t, or g
aatgatacggcgaccaccgagatctacaccggtctcggcattcctgctgaaccgctcttccgatctnnnnnncaagaggtccgggagctgcatgtgtcagagg

SEQ ID NO: 5465 - DNA, 103 bp, Artificial Sequence
  source: /note="Description of Artificial Sequence: Synthetic polynucleotide"
  modified_base (67)..(72): a, c, t, or g
aatgatacggcgaccaccgagatctacaccggtctcggcattcctgctgaaccgctcttccgatctnnnnnntcgattaaccgggagctgcatgtgtcagagg

SEQ ID NO: 5466 - DNA, 103 bp, Artificial Sequence
  source: /note="Description of Artificial Sequence: Synthetic polynucleotide"
  modified_base (67)..(72): a, c, t, or g
aatgatacggcgaccaccgagatctacaccggtctcggcattcctgctgaaccgctcttccgatctnnnnnngaatggacccgggagctgcatgtgtcagagg

SEQ ID NO: 5467 - DNA, 103 bp, Artificial Sequence
  source: /note="Description of Artificial Sequence: Synthetic polynucleotide"
  modified_base (67)..(72): a, c, t, or g
aatgatacggcgaccaccgagatctacaccggtctcggcattcctgctgaaccgctcttccgatctnnnnnnagaatcagccgggagctgcatgtgtcagagg

SEQ ID NO: 5468 - DNA, 103 bp, Artificial Sequence
  source: /note="Description of Artificial Sequence: Synthetic polynucleotide"
  modified_base (67)..(72): a, c, t, or g
aatgatacggcgaccaccgagatctacaccggtctcggcattcctgctgaaccgctcttccgatctnnnnnnaactgccaccgggagctgcatgtgtcagagg

SEQ ID NO: 5469 - DNA, 103 bp, Artificial Sequence
  source: /note="Description of Artificial Sequence: Synthetic polynucleotide"
  modified_base (67)..(72): a, c, t, or g
aatgatacggcgaccaccgagatctacaccggtctcggcattcctgctgaaccgctcttccgatctnnnnnnaagtaacgccgggagctgcatgtgtcagagg

SEQ ID NO: 5470 - DNA, 103 bp, Artificial Sequence
  source: /note="Description of Artificial Sequence: Synthetic polynucleotide"
  modified_base (67)..(72): a, c, t, or g
aatgatacggcgaccaccgagatctacaccggtctcggcattcctgctgaaccgctcttccgatctnnnnnnactcaatgccgggagctgcatgtgtcagagg

SEQ ID NO: 5471 - DNA, 103 bp, Artificial Sequence
  source: /note="Description of Artificial Sequence: Synthetic polynucleotide"
  modified_base (67)..(72): a, c, t, or g
aatgatacggcgaccaccgagatctacaccggtctcggcattcctgctgaaccgctcttccgatctnnnnnncctagtagccgggagctgcatgtgtcagagg

SEQ ID NO: 5472 - DNA, 103 bp, Artificial Sequence
  source: /note="Description of Artificial Sequence: Synthetic polynucleotide"
  modified_base (67)..(72): a, c, t, or g
aatgatacggcgaccaccgagatctacaccggtctcggcattcctgctgaaccgctcttccgatctnnnnnnctgacgttccgggagctgcatgtgtcagagg

SEQ ID NO: 5473 - DNA, 103 bp, Artificial Sequence
  source: /note="Description of Artificial Sequence: Synthetic polynucleotide"
  modified_base (67)..(72): a, c, t, or g
aatgatacggcgaccaccgagatctacaccggtctcggcattcctgctgaaccgctcttccgatctnnnnnntgcagacaccgggagctgcatgtgtcagagg

SEQ ID NO: 5474 - DNA, 103 bp, Artificial Sequence
  source: /note="Description of Artificial Sequence: Synthetic polynucleotide"
  modified_base (67)..(72): a, c, t, or g
aatgatacggcgaccaccgagatctacaccggtctcggcattcctgctgaaccgctcttccgatctnnnnnnagttgaccccgggagctgcatgtgtcagagg

SEQ ID NO: 5475 - DNA, 103 bp, Artificial Sequence
  source: /note="Description of Artificial Sequence: Synthetic polynucleotide"
  modified_base (67)..(72): a, c, t, or g
aatgatacggcgaccaccgagatctacaccggtctcggcattcctgctgaaccgctcttccgatctnnnnnngtctcctaccgggagctgcatgtgtcagagg

SEQ ID NO: 5476 - DNA, 103 bp, Artificial Sequence
  source: /note="Description of Artificial Sequence: Synthetic polynucleotide"
  modified_base (67)..(72): a, c, t, or g
aatgatacggcgaccaccgagatctacaccggtctcggcattcctgctgaaccgctcttccgatctnnnnnnctgcaatcccgggagctgcatgtgtcagagg

SEQ ID NO: 5477 - DNA, 103 bp, Artificial Sequence
  source: /note="Description of Artificial Sequence: Synthetic polynucleotide"
  modified_base (67)..(72): a, c, t, or g
aatgatacggcgaccaccgagatctacaccggtctcggcattcctgctgaaccgctcttccgatctnnnnnntgagcgaaccgggagctgcatgtgtcagagg

SEQ ID NO: 5478 - DNA, 103 bp, Artificial Sequence
  source: /note="Description of Artificial Sequence: Synthetic polynucleotide"
  modified_base (67)..(72): a, c, t, or g
aatgatacggcgaccaccgagatctacaccggtctcggcattcctgctgaaccgctcttccgatctnnnnnnttggactgccgggagctgcatgtgtcagagg

SEQ ID NO: 5479 - DNA, 103 bp, Artificial Sequence
  source: /note="Description of Artificial Sequence: Synthetic polynucleotide"
  modified_base (67)..(72): a, c, t, or g
aatgatacggcgaccaccgagatctacaccggtctcggcattcctgctgaaccgctcttccgatctnnnnnnagcaatccccgggagctgcatgtgtcagagg

SEQ ID NO: 5480 - DNA, 103 bp, Artificial Sequence
  source: /note="Description of Artificial Sequence: Synthetic polynucleotide"
  modified_base (67)..(72): a, c, t, or g
aatgatacggcgaccaccgagatctacaccggtctcggcattcctgctgaaccgctcttccgatctnnnnnncgaactacccgggagctgcatgtgtcagagg

SEQ ID NO: 5481 - DNA, 103 bp, Artificial Sequence
  source: /note="Description of Artificial Sequence: Synthetic polynucleotide"
  modified_base (67)..(72): a, c, t, or g
aatgatacggcgaccaccgagatctacaccggtctcggcattcctgctgaaccgctcttccgatctnnnnnnttaatggcccgggagctgcatgtgtcagagg

SEQ ID NO: 5482 - DNA, 103 bp, Artificial Sequence
  source: /note="Description of Artificial Sequence: Synthetic polynucleotide"
  modified_base (67)..(72): a, c, t, or g
aatgatacggcgaccaccgagatctacaccggtctcggcattcctgctgaaccgctcttccgatctnnnnnngcttagtaccgggagctgcatgtgtcagagg

SEQ ID NO: 5483 - DNA, 94 bp, Artificial Sequence
  source: /note="Description of Artificial Sequence: Synthetic oligonucleotide"
  modified_base (66)..(71): a, c, t, or g
caagcagaagacggcatacgagatacactctttccctacacgacgctcttccgatctcaaggtcannnnnngggctggcaagccacgtttggtg

SEQ ID NO: 5484 - DNA, 94 bp, Artificial Sequence
  source: /note="Description of Artificial Sequence: Synthetic oligonucleotide"
  modified_base (66)..(71): a, c, t, or g
caagcagaagacggcatacgagatacactctttccctacacgacgctcttccgatctgcataactnnnnnngggctggcaagccacgtttggtg

SEQ ID NO: 5485 - DNA, 94 bp, Artificial Sequence
  source: /note="Description of Artificial Sequence: Synthetic oligonucleotide"
  modified_base (66)..(71): a, c, t, or g
caagcagaagacggcatacgagatacactctttccctacacgacgctcttccgatctctctgattnnnnnngggctggcaagccacgtttggtg

SEQ ID NO: 5486 - DNA, 94 bp, Artificial Sequence
  source: /note="Description of Artificial Sequence: Synthetic oligonucleotide"
  modified_base (66)..(71): a, c, t, or g
caagcagaagacggcatacgagatacactctttccctacacgacgctcttccgatcttacgtacgnnnnnngggctggcaagccacgtttggtg

SEQ ID NO: 5487 - DNA, 94 bp, Artificial Sequence
  source: /note="Description of Artificial Sequence: Synthetic oligonucleotide"
  modified_base (66)..(71): a, c, t, or g
caagcagaagacggcatacgagatacactctttccctacacgacgctcttccgatcttacgcgttnnnnnngggctggcaagccacgtttggtg

SEQ ID NO: 5488 - DNA, 94 bp, Artificial Sequence
  source: /note="Description of Artificial Sequence: Synthetic oligonucleotide"
  modified_base (66)..(71): a, c, t, or g
caagcagaagacggcatacgagatacactctttccctacacgacgctcttccgatctctcagtgannnnnngggctggcaagccacgtttggtg

SEQ ID NO: 5489 - DNA, 94 bp, Artificial Sequence
  source: /note="Description of Artificial Sequence: Synthetic oligonucleotide"
  modified_base (66)..(71): a, c, t, or g
caagcagaagacggcatacgagatacactctttccctacacgacgctcttccgatcttctgatatnnnnnngggctggcaagccacgtttggtg

SEQ ID NO: 5490 - DNA, 94 bp, Artificial Sequence
  source: /note="Description of Artificial Sequence: Synthetic oligonucleotide"
  modified_base (66)..(71): a, c, t, or g
caagcagaagacggcatacgagatacactctttccctacacgacgctcttccgatctcatatgctnnnnnngggctggcaagccacgtttggtg

SEQ ID NO: 5491 - DNA, 94 bp, Artificial Sequence
  source: /note="Description of Artificial Sequence: Synthetic oligonucleotide"
  modified_base (66)..(71): a, c, t, or g
caagcagaagacggcatacgagatacactctttccctacacgacgctcttccgatctcgtaattannnnnngggctggcaagccacgtttggtg

SEQ ID NO: 5492 - DNA, 94 bp, Artificial Sequence
  source: /note="Description of Artificial Sequence: Synthetic oligonucleotide"
  modified_base (66)..(71): a, c, t, or g
caagcagaagacggcatacgagatacactctttccctacacgacgctcttccgatctacgtactcnnnnnngggctggcaagccacgtttggtg

SEQ ID NO: 5493 - DNA, 94 bp, Artificial Sequence
  source: /note="Description of Artificial Sequence: Synthetic oligonucleotide"
  modified_base (66)..(71): a, c, t, or g
caagcagaagacggcatacgagatacactctttccctacacgacgctcttccgatctcttctaagnnnnnngggctggcaagccacgtttggtg

SEQ ID NO: 5494 - DNA, 94 bp, Artificial Sequence
  source: /note="Description of Artificial Sequence: Synthetic oligonucleotide"
  modified_base (66)..(71): a, c, t, or g
caagcagaagacggcatacgagatacactctttccctacacgacgctcttccgatctactatgacnnnnnngggctggcaagccacgtttggtg

SEQ ID NO: 5495 - DNA, 94 bp, Artificial Sequence
  source: /note="Description of Artificial Sequence: Synthetic oligonucleotide"
  modified_base (66)..(71): a, c, t, or g
caagcagaagacggcatacgagatacactctttccctacacgacgctcttccgatctgacgttaannnnnngggctggcaagccacgtttggtg

SEQ ID NO: 5496 - DNA, 94 bp, Artificial Sequence
  source: /note="Description of Artificial Sequence: Synthetic oligonucleotide"
  modified_base (66)..(71): a, c, t, or g
caagcagaagacggcatacgagatacactctttccctacacgacgctcttccgatctacaagatannnnnngggctggcaagccacgtttggtg

SEQ ID NO: 5497 - DNA, 94 bp, Artificial Sequence
  source: /note="Description of Artificial Sequence: Synthetic oligonucleotide"
  modified_base (66)..(71): a, c, t, or g
caagcagaagacggcatacgagatacactctttccctacacgacgctcttccgatctgactaagannnnnngggctggcaagccacgtttggtg

SEQ ID NO: 5498 - DNA, 94 bp, Artificial Sequence
  source: /note="Description of Artificial Sequence: Synthetic oligonucleotide"
  modified_base (66)..(71): a, c, t, or g
caagcagaagacggcatacgagatacactctttccctacacgacgctcttccgatctgtgtctacnnnnnngggctggcaagccacgtttggtg

SEQ ID NO: 5499 - DNA, 94 bp, Artificial Sequence
  source: /note="Description of Artificial Sequence: Synthetic oligonucleotide"
  modified_base (66)..(71): a, c, t, or g
caagcagaagacggcatacgagatacactctttccctacacgacgctcttccgatctttcactagnnnnnngggctggcaagccacgtttggtg

SEQ ID NO: 5500 - DNA, 94 bp, Artificial Sequence
  source: /note="Description of Artificial Sequence: Synthetic oligonucleotide"
  modified_base (66)..(71): a, c, t, or g
caagcagaagacggcatacgagatacactctttccctacacgacgctcttccgatctaatcggatnnnnnngggctggcaagccacgtttggtg

SEQ ID NO: 5501 - DNA, 94 bp, Artificial Sequence
  source: /note="Description of Artificial Sequence: Synthetic oligonucleotide"
  modified_base (66)..(71): a, c, t, or g
caagcagaagacggcatacgagatacactctttccctacacgacgctcttccgatctagtaccgannnnnngggctggcaagccacgtttggtg

SEQ ID NO: 5502 - DNA, 94 bp, Artificial Sequence
  source: /note="Description of Artificial Sequence: Synthetic oligonucleotide"
  modified_base (66)..(71): a, c, t, or g
caagcagaagacggcatacgagatacactctttccctacacgacgctcttccgatctttgcctcannnnnngggctggcaagccacgtttggtg

SEQ ID NO: 5503 - DNA, 94 bp, Artificial Sequence
  source: /note="Description of Artificial Sequence: Synthetic oligonucleotide"
  modified_base (66)..(71): a, c, t, or g
caagcagaagacggcatacgagatacactctttccctacacgacgctcttccgatcttcgttagcnnnnnngggctggcaagccacgtttggtg

SEQ ID NO: 5504 - DNA, 94 bp, Artificial Sequence
  source: /note="Description of Artificial Sequence: Synthetic oligonucleotide"
  modified_base (66)..(71): a, c, t, or g
caagcagaagacggcatacgagatacactctttccctacacgacgctcttccgatcttatagttcnnnnnngggctggcaagccacgtttggtg

SEQ ID NO: 5505 - DNA, 94 bp, Artificial Sequence
  source: /note="Description of Artificial Sequence: Synthetic oligonucleotide"
  modified_base (66)..(71): a, c, t, or g
caagcagaagacggcatacgagatacactctttccctacacgacgctcttccgatcttggcgtatnnnnnngggctggcaagccacgtttggtg

SEQ ID NO: 5506 - DNA, 94 bp, Artificial Sequence
  source: /note="Description of Artificial Sequence: Synthetic oligonucleotide"
  modified_base (66)..(71): a, c, t, or g
caagcagaagacggcatacgagatacactctttccctacacgacgctcttccgatcttggacatgnnnnnngggctggcaagccacgtttggtg

SEQ ID NO: 5507 - DNA, 94 bp, Artificial Sequence
  source: /note="Description of Artificial Sequence: Synthetic oligonucleotide"
  modified_base (66)..(71): a, c, t, or g
caagcagaagacggcatacgagatacactctttccctacacgacgctcttccgatctaggttgctnnnnnngggctggcaagccacgtttggtg

SEQ ID NO: 5508 - DNA, 94 bp, Artificial Sequence
  source: /note="Description of Artificial Sequence: Synthetic oligonucleotide"
  modified_base (66)..(71): a, c, t, or g
caagcagaagacggcatacgagatacactctttccctacacgacgctcttccgatctatatgctgnnnnnngggctggcaagccacgtttggtg

SEQ ID NO: 5509 - DNA, 94 bp, Artificial Sequence
  source: /note="Description of Artificial Sequence: Synthetic oligonucleotide"
  modified_base (66)..(71): a, c, t, or g
caagcagaagacggcatacgagatacactctttccctacacgacgctcttccgatctgtacagtgnnnnnngggctggcaagccacgtttggtg

SEQ ID NO: 5510 - DNA, 94 bp, Artificial Sequence
  source: /note="Description of Artificial Sequence: Synthetic oligonucleotide"
  modified_base (66)..(71): a, c, t, or g
caagcagaagacggcatacgagatacactctttccctacacgacgctcttccgatctatccatggnnnnnngggctggcaagccacgtttggtg

SEQ ID NO: 5511 - DNA, 94 bp, Artificial Sequence
  source: /note="Description of Artificial Sequence: Synthetic oligonucleotide"
  modified_base (66)..(71): a, c, t, or g
caagcagaagacggcatacgagatacactctttccctacacgacgctcttccgatcttgatgcgannnnnngggctggcaagccacgtttggtg

SEQ ID NO: 5512 - DNA, 94 bp, Artificial Sequence
  source: /note="Description of Artificial Sequence: Synthetic oligonucleotide"
  modified_base (66)..(71): a, c, t, or g
caagcagaagacggcatacgagatacactctttccctacacgacgctcttccgatctgtagcagtnnnnnngggctggcaagccacgtttggtg

SEQ ID NO: 5513 - DNA, 94 bp, Artificial Sequence
  source: /note="Description of Artificial Sequence: Synthetic oligonucleotide"
  modified_base (66)..(71): a, c, t, or g
caagcagaagacggcatacgagatacactctttccctacacgacgctcttccgatctggatcatcnnnnnngggctggcaagccacgtttggtg

SEQ ID NO: 5514 - DNA, 94 bp, Artificial Sequence
  source: /note="Description of Artificial Sequence: Synthetic oligonucleotide"
  modified_base (66)..(71): a, c, t, or g
caagcagaagacggcatacgagatacactctttccctacacgacgctcttccgatctgtgaacgtnnnnnngggctggcaagccacgtttggtg

SEQ ID NO: 5515 - DNA, 94 bp, Artificial Sequence
  source: /note="Description of Artificial Sequence: Synthetic oligonucleotide"
  modified_base (66)..(71): a, c, t, or g
caagcagaagacggcatacgagatacactctttccctacacgacgctcttccgatctattaagcgnnnnnngggctggcaagccacgtttggtg

SEQ ID NO: 5516 - DNA, 94 bp, Artificial Sequence
  source: /note="Description of Artificial Sequence: Synthetic oligonucleotide"
  modified_base (66)..(71): a, c, t, or g
caagcagaagacggcatacgagatacactctttccctacacgacgctcttccgatcttattggcgnnnnnngggctggcaagccacgtttggtg

SEQ ID NO: 5517 - DNA, 94 bp, Artificial Sequence
  source: /note="Description of Artificial Sequence: Synthetic oligonucleotide"
  modified_base (66)..(71): a, c, t, or g
caagcagaagacggcatacgagatacactctttccctacacgacgctcttccgatctcgattacannnnnngggctggcaagccacgtttggtg

SEQ ID NO: 5518 - DNA, 94 bp, Artificial Sequence
  source: /note="Description of Artificial Sequence: Synthetic oligonucleotide"
  modified_base (66)..(71): a, c, t, or g
caagcagaagacggcatacgagatacactctttccctacacgacgctcttccgatcttgtcatcgnnnnnngggctggcaagccacgtttggtg

SEQ ID NO: 5519 - DNA, 94 bp, Artificial Sequence
  source: /note="Description of Artificial Sequence: Synthetic oligonucleotide"
  modified_base (66)..(71): a, c, t, or g
caagcagaagacggcatacgagatacactctttccctacacgacgctcttccgatcttatcaagtnnnnnngggctggcaagccacgtttggtg

SEQ ID NO: 5520 - DNA, 94 bp, Artificial Sequence
  source: /note="Description of Artificial Sequence: Synthetic oligonucleotide"
  modified_base (66)..(71): a, c, t, or g
caagcagaagacggcatacgagatacactctttccctacacgacgctcttccgatctaggcttgannnnnngggctggcaagccacgtttggtg

SEQ ID NO: 5521 - DNA, 94 bp, Artificial Sequence
  source: /note="Description of Artificial Sequence: Synthetic oligonucleotide"
  modified_base (66)..(71): a, c, t, or g
caagcagaagacggcatacgagatacactctttccctacacgacgctcttccgatctgataaccannnnnngggctggcaagccacgtttggtg

SEQ ID NO: 5522 - DNA, 94 bp, Artificial Sequence
  source: /note="Description of Artificial Sequence: Synthetic oligonucleotide"
  modified_base (66)..(71): a, c, t, or g
caagcagaagacggcatacgagatacactctttccctacacgacgctcttccgatctaatcctgcnnnnnngggctggcaagccacgtttggtg

SEQ ID NO: 5523 - DNA, 94 bp, Artificial Sequence
  source: /note="Description of Artificial Sequence: Synthetic oligonucleotide"
  modified_base (66)..(71): a, c, t, or g
caagcagaagacggcatacgagatacactctttccctacacgacgctcttccgatctgttatatcnnnnnngggctggcaagccacgtttggtg

SEQ ID NO: 5524 - DNA, 94 bp, Artificial Sequence
  source: /note="Description of Artificial Sequence: Synthetic oligonucleotide"
  modified_base (66)..(71): a, c, t, or g
caagcagaagacggcatacgagatacactctttccctacacgacgctcttccgatctacacacgtnnnnnngggctggcaagccacgtttggtg

SEQ ID NO: 5525 - DNA, 94 bp, Artificial Sequence
  source: /note="Description of Artificial Sequence: Synthetic oligonucleotide"
  modified_base (66)..(71): a, c, t, or g
caagcagaagacggcatacgagatacactctttccctacacgacgctcttccgatctatacgactnnnnnngggctggcaagccacgtttggtg

SEQ ID NO: 5526 - DNA, 94 bp, Artificial Sequence
  source: /note="Description of Artificial Sequence: Synthetic oligonucleotide"
  modified_base (66)..(71): a, c, t, or g
caagcagaagacggcatacgagatacactctttccctacacgacgctcttccgatctatcttcgtnnnnnngggctggcaagccacgtttggtg

SEQ ID NO: 5527 - DNA, 94 bp, Artificial Sequence
  source: /note="Description of Artificial Sequence: Synthetic oligonucleotide"
  modified_base (66)..(71): a, c, t, or g
caagcagaagacggcatacgagatacactctttccctacacgacgctcttccgatctacatgtatnnnnnngggctggcaagccacgtttggtg

SEQ ID NO: 5528 - DNA, 94 bp, Artificial Sequence
  source: /note="Description of Artificial Sequence: Synthetic oligonucleotide"
  modified_base (66)..(71): a, c, t, or g
caagcagaagacggcatacgagatacactctttccctacacgacgctcttccgatcttccacagtnnnnnngggctggcaagccacgtttggtg

SEQ ID NO: 5529 - DNA, 94 bp, Artificial Sequence
  source: /note="Description of Artificial Sequence: Synthetic oligonucleotide"
  modified_base (66)..(71): a, c, t, or g
caagcagaagacggcatacgagatacactctttccctacacgacgctcttccgatctcagtctgtnnnnnngggctggcaagccacgtttggtg

SEQ ID NO: 5530 - DNA, 94 bp, Artificial Sequence
  source: /note="Description of Artificial Sequence: Synthetic oligonucleotide"
  modified_base (66)..(71): a, c, t, or g
caagcagaagacggcatacgagatacactctttccctacacgacgctcttccgatcttccatgtgnnnnnngggctggcaagccacgtttggtg

SEQ ID NO: 5531 - DNA, 94 bp, Artificial Sequence
  source: /note="Description of Artificial Sequence: Synthetic oligonucleotide"
  modified_base (66)..(71): a, c, t, or g
caagcagaagacggcatacgagatacactctttccctacacgacgctcttccgatcttcactgcannnnnngggctggcaagccacgtttggtg

SEQ ID NO: 5532 - DNA, 94 bp, Artificial Sequence
  source: /note="Description of Artificial Sequence: Synthetic oligonucleotide"
  modified_base (66)..(71): a, c, t, or g
caagcagaagacggcatacgagatacactctttccctacacgacgctcttccgatctatggtcaannnnnngggctggcaagccacgtttggtg

SEQ ID NO: 5533 - DNA, 94 bp, Artificial Sequence
  source: /note="Description of Artificial Sequence: Synthetic oligonucleotide"
  modified_base (66)..(71): a, c, t, or g
caagcagaagacggcatacgagatacactctttccctacacgacgctcttccgatctcaagtcacnnnnnngggctggcaagccacgtttggtg

SEQ ID NO: 5534 - DNA, 94 bp, Artificial Sequence
  source: /note="Description of Artificial Sequence: Synthetic oligonucleotide"
  modified_base (66)..(71): a, c, t, or g
caagcagaagacggcatacgagatacactctttccctacacgacgctcttccgatcttagacggannnnnngggctggcaagccacgtttggtg

SEQ ID NO: 5535 - DNA, 94 bp, Artificial Sequence
  source: /note="Description of Artificial Sequence: Synthetic oligonucleotide"
  modified_base (66)..(71): a, c, t, or g
caagcagaagacggcatacgagatacactctttccctacacgacgctcttccgatctcagctcttnnnnnngggctggcaagccacgtttggtg

SEQ ID NO: 5536 - DNA, 94 bp, Artificial Sequence
  source: /note="Description of Artificial Sequence: Synthetic oligonucleotide"
  modified_base (66)..(71): a, c, t, or g
caagcagaagacggcatacgagatacactctttccctacacgacgctcttccgatctgagcgatannnnnngggctggcaagccacgtttggtg

SEQ ID NO: 5537 - DNA, 94 bp, Artificial Sequence
  source: /note="Description of Artificial Sequence: Synthetic oligonucleotide"
  modified_base (66)..(71): a, c, t, or g
caagcagaagacggcatacgagatacactctttccctacacgacgctcttccgatctctcgagaannnnnngggctggcaagccacgtttggtg

SEQ ID NO: 5538 - DNA, 94 bp, Artificial Sequence
  source: /note="Description of Artificial Sequence: Synthetic oligonucleotide"
  modified_base (66)..(71): a, c, t, or g
caagcagaagacggcatacgagatacactctttccctacacgacgctcttccgatctatgacaccnnnnnngggctggcaagccacgtttggtg

SEQ ID NO: 5539 - DNA, 94 bp, Artificial Sequence
  source: /note="Description of Artificial Sequence: Synthetic oligonucleotide"
  modified_base (66)..(71): a, c, t, or g
caagcagaagacggcatacgagatacactctttccctacacgacgctcttccgatctcttcacgannnnnngggctggcaagccacgtttggtg

SEQ ID NO: 5540 - DNA, 94 bp, Artificial Sequence
  source: /note="Description of Artificial Sequence: Synthetic oligonucleotide"
  modified_base (66)..(71): a, c, t, or g
caagcagaagacggcatacgagatacactctttccctacacgacgctcttccgatctctataaggnnnnnngggctggcaagccacgtttggtg

SEQ ID NO: 5541 - DNA, 94 bp, Artificial Sequence
  source: /note="Description of Artificial Sequence: Synthetic oligonucleotide"
  modified_base (66)..(71): a, c, t, or g
caagcagaagacggcatacgagatacactctttccctacacgacgctcttccgatctcgtagagtnnnnnngggctggcaagccacgtttggtg

SEQ ID NO: 5542 - DNA, 94 bp, Artificial Sequence
  source: /note="Description of Artificial Sequence: Synthetic oligonucleotide"
  modified_base (66)..(71): a, c, t, or g
caagcagaagacggcatacgagatacactctttccctacacgacgctcttccgatctatagatacnnnnnngggctggcaagccacgtttggtg

SEQ ID NO: 5543 - DNA, 94 bp, Artificial Sequence
  source: /note="Description of Artificial Sequence: Synthetic oligonucleotide"
  modified_base (66)..(71): a, c, t, or g
caagcagaagacggcatacgagatacactctttccctacacgacgctcttccgatcttcgtcgatnnnnnngggctggcaagccacgtttggtg

SEQ ID NO: 5544 - DNA, 94 bp, Artificial Sequence
  source: /note="Description of Artificial Sequence: Synthetic oligonucleotide"
  modified_base (66)..(71): a, c, t, or g
caagcagaagacggcatacgagatacactctttccctacacgacgctcttccgatcttaagaatcnnnnnngggctggcaagccacgtttggtg

SEQ ID NO: 5545 - DNA, 94 bp, Artificial Sequence
  source: /note="Description of Artificial Sequence: Synthetic oligonucleotide"
  modified_base (66)..(71): a, c, t, or g
caagcagaagacggcatacgagatacactctttccctacacgacgctcttccgatctaatgacagnnnnnngggctggcaagccacgtttggtg

SEQ ID NO: 5546 - DNA, 94 bp, Artificial Sequence
  source: /note="Description of Artificial Sequence: Synthetic oligonucleotide"
  modified_base (66)..(71): a, c, t, or g
caagcagaagacggcatacgagatacactctttccctacacgacgctcttccgatctagctagtgnnnnnngggctggcaagccacgtttggtg

SEQ ID NO: 5547 - DNA, 94 bp, Artificial Sequence
  source: /note="Description of Artificial Sequence: Synthetic oligonucleotide"
  modified_base (66)..(71): a, c, t, or g
caagcagaagacggcatacgagatacactctttccctacacgacgctcttccgatcttgagacctnnnnnngggctggcaagccacgtttggtg

SEQ ID NO: 5548 - DNA, 94 bp, Artificial Sequence
  source: /note="Description of Artificial Sequence: Synthetic oligonucleotide"
  modified_base (66)..(71): a, c, t, or g
caagcagaagacggcatacgagatacactctttccctacacgacgctcttccgatctagcgtaatnnnnnngggctggcaagccacgtttggtg

SEQ ID NO: 5549 - DNA, 94 bp, Artificial Sequence
  source: /note="Description of Artificial Sequence: Synthetic oligonucleotide"
  modified_base (66)..(71): a, c, t, or g
caagcagaagacggcatacgagatacactctttccctacacgacgctcttccgatcttaaccaagnnnnnngggctggcaagccacgtttggtg

SEQ ID NO: 5550 - DNA, 94 bp, Artificial Sequence
  source: /note="Description of Artificial Sequence: Synthetic oligonucleotide"
  modified_base (66)..(71): a, c, t, or g
caagcagaagacggcatacgagatacactctttccctacacgacgctcttccgatctgatggcttnnnnnngggctggcaagccacgtttggtg

SEQ ID NO: 5551 - DNA, 94 bp, Artificial Sequence
  source: /note="Description of Artificial Sequence: Synthetic oligonucleotide"
  modified_base (66)..(71): a, c, t, or g
caagcagaagacggcatacgagatacactctttccctacacgacgctcttccgatctgcatctgannnnnngggctggcaagccacgtttggtg

SEQ ID NO: 5552 - DNA, 94 bp, Artificial Sequence
  source: /note="Description of Artificial Sequence: Synthetic oligonucleotide"
  modified_base (66)..(71): a, c, t, or g
caagcagaagacggcatacgagatacactctttccctacacgacgctcttccgatctttccggtannnnnngggctggcaagccacgtttggtg

SEQ ID NO: 5553 - DNA, 94 bp, Artificial Sequence
  source: /note="Description of Artificial Sequence: Synthetic oligonucleotide"
  modified_base (66)..(71): a, c, t, or g
caagcagaagacggcatacgagatacactctttccctacacgacgctcttccgatctgacactctnnnnnngggctggcaagccacgtttggtg

SEQ ID NO: 5554 - DNA, 94 bp, Artificial Sequence
  source: /note="Description of Artificial Sequence: Synthetic oligonucleotide"
  modified_base (66)..(71): a, c, t, or g
caagcagaagacggcatacgagatacactctttccctacacgacgctcttccgatctttaagcatnnnnnngggctggcaagccacgtttggtg

SEQ ID NO: 5555 - DNA, 94 bp, Artificial Sequence
  source: /note="Description of Artificial Sequence: Synthetic oligonucleotide"
  modified_base (66)..(71): a, c, t, or g
caagcagaagacggcatacgagatacactctttccctacacgacgctcttccgatcttgctacacnnnnnngggctggcaagccacgtttggtg

SEQ ID NO: 5556 - DNA, 94 bp, Artificial Sequence
  source: /note="Description of Artificial Sequence: Synthetic oligonucleotide"
  modified_base (66)..(71): a, c, t, or g
caagcagaagacggcatacgagatacactctttccctacacgacgctcttccgatcttcagcttgnnnnnngggctggcaagccacgtttggtg

SEQ ID NO: 5557 - DNA, 94 bp, Artificial Sequence
  source: /note="Description of Artificial Sequence: Synthetic oligonucleotide"
  modified_base (66)..(71): a, c, t, or g
caagcagaagacggcatacgagatacactctttccctacacgacgctcttccgatctcatgtagannnnnngggctggcaagccacgtttggtg

SEQ ID NO: 5558 - DNA, 94 bp, Artificial Sequence
  source: /note="Description of Artificial Sequence: Synthetic oligonucleotide"
  modified_base (66)..(71): a, c, t, or g
caagcagaagacggcatacgagatacactctttccctacacgacgctcttccgatctttcggaacnnnnnngggctggcaagccacgtttggtg

SEQ ID NO: 5559 - DNA, 94 bp, Artificial Sequence
  source: /note="Description of Artificial Sequence: Synthetic oligonucleotide"
  modified_base (66)..(71): a, c, t, or g
caagcagaagacggcatacgagatacactctttccctacacgacgctcttccgatctgcaattcgnnnnnngggctggcaagccacgtttggtg

SEQ ID NO: 5560 - DNA, 94 bp, Artificial Sequence
  source: /note="Description of Artificial Sequence: Synthetic oligonucleotide"
  modified_base (66)..(71): a, c, t, or g
caagcagaagacggcatacgagatacactctttccctacacgacgctcttccgatctcaagaggtnnnnnngggctggcaagccacgtttggtg

SEQ ID NO: 5561 - DNA, 94 bp, Artificial Sequence
  source: /note="Description of Artificial Sequence: Synthetic oligonucleotide"
  modified_base (66)..(71): a, c, t, or g
caagcagaagacggcatacgagatacactctttccctacacgacgctcttccgatcttcgattaannnnnngggctggcaagccacgtttggtg

SEQ ID NO: 5562 - DNA, 94 bp, Artificial Sequence
  source: /note="Description of Artificial Sequence: Synthetic oligonucleotide"
  modified_base (66)..(71): a, c, t, or g
caagcagaagacggcatacgagatacactctttccctacacgacgctcttccgatctgaatggacnnnnnngggctggcaagccacgtttggtg

SEQ ID NO: 5563 - DNA, 94 bp, Artificial Sequence
  source: /note="Description of Artificial Sequence: Synthetic oligonucleotide"
  modified_base (66)..(71): a, c, t, or g
caagcagaagacggcatacgagatacactctttccctacacgacgctcttccgatctagaatcagnnnnnngggctggcaagccacgtttggtg

SEQ ID NO: 5564 - DNA, 94 bp, Artificial Sequence
  source: /note="Description of Artificial Sequence: Synthetic oligonucleotide"
  modified_base (66)..(71): a, c, t, or g
caagcagaagacggcatacgagatacactctttccctacacgacgctcttccgatctaactgccannnnnngggctggcaagccacgtttggtg

SEQ ID NO: 5565 - DNA, 94 bp, Artificial Sequence
  source: /note="Description of Artificial Sequence: Synthetic oligonucleotide"
  modified_base (66)..(71): a, c, t, or g
caagcagaagacggcatacgagatacactctttccctacacgacgctcttccgatctaagtaacgnnnnnngggctggcaagccacgtttggtg

SEQ ID NO: 5566 - DNA, 94 bp, Artificial Sequence
  source: /note="Description of Artificial Sequence: Synthetic oligonucleotide"
  modified_base (66)..(71): a, c, t, or g
caagcagaagacggcatacgagatacactctttccctacacgacgctcttccgatctactcaatgnnnnnngggctggcaagccacgtttggtg

SEQ ID NO: 5567 - DNA, 94 bp, Artificial Sequence
  source: /note="Description of Artificial Sequence: Synthetic oligonucleotide"
  modified_base (66)..(71): a, c, t, or g
caagcagaagacggcatacgagatacactctttccctacacgacgctcttccgatctcctagtagnnnnnngggctggcaagccacgtttggtg

SEQ ID NO: 5568 - DNA, 94 bp, Artificial Sequence
  source: /note="Description of Artificial Sequence: Synthetic oligonucleotide"
  modified_base (66)..(71): a, c, t, or g
caagcagaagacggcatacgagatacactctttccctacacgacgctcttccgatctctgacgttnnnnnngggctggcaagccacgtttggtg

SEQ ID NO: 5569 - DNA, 94 bp, Artificial Sequence
  source: /note="Description of Artificial Sequence: Synthetic oligonucleotide"
  modified_base (66)..(71): a, c, t, or g
caagcagaagacggcatacgagatacactctttccctacacgacgctcttccgatcttgcagacannnnnngggctggcaagccacgtttggtg

SEQ ID NO: 5570 - DNA, 94 bp, Artificial Sequence
  source: /note="Description of Artificial Sequence: Synthetic oligonucleotide"
  modified_base (66)..(71): a, c, t, or g
caagcagaagacggcatacgagatacactctttccctacacgacgctcttccgatctagttgaccnnnnnngggctggcaagccacgtttggtg

SEQ ID NO: 5571 - DNA, 94 bp, Artificial Sequence
  source: /note="Description of Artificial Sequence: Synthetic oligonucleotide"
  modified_base (66)..(71): a, c, t, or g
caagcagaagacggcatacgagatacactctttccctacacgacgctcttccgatctgtctcctannnnnngggctggcaagccacgtttggtg

SEQ ID NO: 5572 - DNA, 94 bp, Artificial Sequence
  source: /note="Description of Artificial Sequence: Synthetic oligonucleotide"
  modified_base (66)..(71): a, c, t, or g
caagcagaagacggcatacgagatacactctttccctacacgacgctcttccgatctctgcaatcnnnnnngggctggcaagccacgtttggtg

SEQ ID NO: 5573 - DNA, 94 bp, Artificial Sequence
  source: /note="Description of Artificial Sequence: Synthetic oligonucleotide"
  modified_base (66)..(71): a, c, t, or g
caagcagaagacggcatacgagatacactctttccctacacgacgctcttccgatcttgagcgaannnnnngggctggcaagccacgtttggtg

SEQ ID NO: 5574 - DNA, 94 bp, Artificial Sequence
  source: /note="Description of Artificial Sequence: Synthetic oligonucleotide"
  modified_base (66)..(71): a, c, t, or g
caagcagaagacggcatacgagatacactctttccctacacgacgctcttccgatctttggactgnnnnnngggctggcaagccacgtttggtg

SEQ ID NO: 5575 - DNA, 94 bp, Artificial Sequence
  source: /note="Description of Artificial Sequence: Synthetic oligonucleotide"
  modified_base (66)..(71): a, c, t, or g
caagcagaagacggcatacgagatacactctttccctacacgacgctcttccgatctagcaatccnnnnnngggctggcaagccacgtttggtg

SEQ ID NO: 5576 - DNA, 94 bp, Artificial Sequence
  source: /note="Description of Artificial Sequence: Synthetic oligonucleotide"
  modified_base (66)..(71): a, c, t, or g
caagcagaagacggcatacgagatacactctttccctacacgacgctcttccgatctcgaactacnnnnnngggctggcaagccacgtttggtg

SEQ ID NO: 5577 - DNA, 94 bp, Artificial Sequence
  source: /note="Description of Artificial Sequence: Synthetic oligonucleotide"
  modified_base (66)..(71): a, c, t, or g
caagcagaagacggcatacgagatacactctttccctacacgacgctcttccgatctttaatggcnnnnnngggctggcaagccacgtttggtg

SEQ ID NO: 5578 - DNA, 94 bp, Artificial Sequence
  source: /note="Description of Artificial Sequence: Synthetic oligonucleotide"
  modified_base (66)..(71): a, c, t, or g
caagcagaagacggcatacgagatacactctttccctacacgacgctcttccgatctgcttagtannnnnngggctggcaagccacgtttggtg

SEQ ID NO: 5579 - DNA, 21 bp, Artificial Sequence
  source: /note="Description of Artificial Sequence: Synthetic primer"
gatgaagacagatggtgcagc

SEQ ID NO: 5580 - DNA, 17 bp, Artificial Sequence
  source: /note="Description of Artificial Sequence: Synthetic primer"
ggcgggaacagagtgac

SEQ ID NO: 5581 - DNA, 19 bp, Artificial Sequence
  source: /note="Description of Artificial Sequence: Synthetic primer"
agggtgggaacagagtgac

SEQ ID NO: 5582 - DNA, 19 bp, Artificial Sequence
  source: /note="Description of Artificial Sequence: Synthetic primer"
gcttgaagctcctcagagg

SEQ ID NO: 5583 - DNA, 17 bp, Artificial Sequence
  source: /note="Description of Artificial Sequence: Synthetic primer"
ggcgggaacagagtgac

SEQ ID NO: 5584 - DNA, 17 bp, Artificial Sequence
  source: /note="Description of Artificial Sequence: Synthetic primer"
aggctcagcgggaagac

SEQ ID NO: 5585 - DNA, 19 bp, Artificial Sequence
  source: /note="Description of Artificial Sequence: Synthetic primer"
gaacacatccggagccttg

SEQ ID NO: 5586 - DNA, 19 bp, Artificial Sequence
  source: /note="Description of Artificial Sequence: Synthetic primer"
ggtggcattggagggaatg

SEQ ID NO: 5587 - DNA, 18 bp, Artificial Sequence
  source: /note="Description of Artificial Sequence: Synthetic primer"
aagaccgatgggcccttg

SEQ ID NO: 5588 - DNA, 18 bp, Artificial Sequence
  source: /note="Description of Artificial Sequence: Synthetic primer"
ctctcggaggtgctcctg

SEQ ID NO: 5589 - DNA, 21 bp, Artificial Sequence
  source: /note="Description of Artificial Sequence: Synthetic primer"
aattctcacaggagacgaggg

SEQ ID NO: 5590 - DNA, 17 bp, Artificial Sequence
  source: /note="Description of Artificial Sequence: Synthetic primer"
tggtacacggcagggtc

SEQ ID NO: 5591 - DNA, 28 bp, Artificial Sequence
  source: /note="Description of Artificial Sequence: Synthetic primer"
agtctctcagctggtacacggcagggtc

SEQ ID NO: 5592 - DNA, 50 bp, Artificial Sequence
  source: /note="Description of Artificial Sequence: Synthetic primer"
acagacttgtcactggatttagagtctctcagctggtacacggcagggtc

SEQ ID NO: 5593 - DNA, 50 bp, Artificial Sequence
  source: /note="Description of Artificial Sequence: Synthetic primer"
gagatctctgcttctgatggctcaaacacagcgacctcgggtgggaacac

SEQ ID NO: 5594 - DNA, 18 bp, Artificial Sequence
  source: /note="Description of Artificial Sequence: Synthetic primer"
caaacacagcgacctcgg

SEQ ID NO: 5595 - DNA, 19 bp, Artificial Sequence
  source: /note="Description of Artificial Sequence: Synthetic primer"
atggctcaaacacagcgac

SEQ ID NO: 5596 - DNA, 22 bp, Artificial Sequence
  source: /note="Description of Artificial Sequence: Synthetic primer"
gatggtttggtatgaggctgac

SEQ ID NO: 5597 - DNA, 19 bp, Artificial Sequence
  source: /note="Description of Artificial Sequence: Synthetic primer"
ccttcaccagacaagcgac

SEQ ID NO: 5598 - DNA, 21 bp, Artificial Sequence
  source: /note="Description of Artificial Sequence: Synthetic primer"
gaaaaatagtgggcttggggg

SEQ ID NO: 5599 - DNA, 19 bp, Artificial Sequence
  source: /note="Description of Artificial Sequence: Synthetic primer"
cagtatctggagtcattga

SEQ ID NO: 5600 - DNA, 21 bp, Artificial Sequence
  source: /note="Description of Artificial Sequence: Synthetic primer"
tgcttctgatggctcaaacac

SEQ ID NO: 5601 - DNA, 30 bp, Artificial Sequence
  source: /note="Description of Artificial Sequence: Synthetic primer"
gatggagtcgggaaggaagtcctgtgcgag

SEQ ID NO: 5602 - DNA, 25 bp, Artificial Sequence
  source: /note="Description of Artificial Sequence: Synthetic primer"
gggaagacsgatgggcccttggtgg

SEQ ID NO: 5603 - DNA, 27 bp, Artificial Sequence
  source: /note="Description of Artificial Sequence: Synthetic primer"
caggcakgcgaygaccacgttcccatc

SEQ ID NO: 5604 - DNA, 34 bp, Artificial Sequence
  source: /note="Description of Artificial Sequence: Synthetic primer"
catcagatggcgggaagatgaagacagatggtgc

SEQ ID NO: 5605 - DNA, 28 bp, Artificial Sequence
  source: /note="Description of Artificial Sequence: Synthetic primer"
cctcagaggagggtgggaacagagtgac

SEQ ID NO: 5606 - DNA, 31 bp, Artificial Sequence
  source: /note="Description of Artificial Sequence: Synthetic primer"
gctcaaacacagcgacctcgggtgggaacac

SEQ ID NO: 5607 - DNA, 30 bp, Artificial Sequence
  source: /note="Description of Artificial Sequence: Synthetic primer"
  source: /note="Description of Combined DNA/RNA Molecule: Synthetic primer"
  modified_base (26)..(30): Riboguanine
  source: /note="3' phosphate blocking moiety"
aagcagtggtatcaacgcagagtacggggg

SEQ ID NO: 5608 - DNA, 40 bp, Artificial Sequence
  source: /note="Description of Artificial Sequence: Synthetic primer"
  source: /note="Description of Combined DNA/RNA Molecule: Synthetic primer"
  modified_base (32)..(37): a, c, t, g, unknown or other
  modified_base (38)..(40): Riboguanine
aagcagtggtatcaacgcagagtgcagugcunnnnnnggg

SEQ ID NO: 5609 - DNA, 57 bp, Artificial Sequence
  source: /note="Description of Artificial Sequence: Synthetic primer"
  source: /note="5' Biotin"
  modified_base (57)..(57): a, c, t, or g
aagcagtggtatcaacgcagagtacttttttttttttttttttttttttttttttvn

SEQ ID NO: 5610 - DNA, 23 bp, Artificial Sequence
  source: /note="Description of Artificial Sequence: Synthetic primer"
  source: /note="5' Biotin"
aagcagtggtatcaacgcagagt

SEQ ID NO: 5611 - DNA, 45 bp, Artificial Sequence
  source: /note="Description of Artificial Sequence: Synthetic primer"
ctaatacgactcactatagggcaagcagtggtatcaacgcagagt

SEQ ID NO: 5612 - DNA, 22 bp, Artificial Sequence
  source: /note="Description of Artificial Sequence: Synthetic primer"
ctaatacgactcactatagggc

SEQ ID NO: 5613 - DNA, 60 bp, Artificial Sequence
  source: /note="Description of Artificial Sequence: Synthetic primer"
  modified_base (24)..(31): a, c, t, g, unknown or other
ccgggagctgcatgtgtcagaggnnnnnnnngtcttacctacaactgtgagtctggtgcc

SEQ ID NO: 5614 - DNA, 59 bp, Artificial Sequence
  source: /note="Description of Artificial Sequence: Synthetic primer"
  modified_base (24)..(31): a, c, t, g, unknown or other
ccgggagctgcatgtgtcagaggnnnnnnnnccttacctacaacggttaacctggtccc

SEQ ID NO: 5615 - DNA, 62 bp, Artificial Sequence
  source: /note="Description of Artificial Sequence: Synthetic primer"
  modified_base (24)..(31): a, c, t, g, unknown or other
ccgggagctgcatgtgtcagaggnnnnnnnncttactcacctacaacagtgagccaacttcc

SEQ ID NO: 5616 - DNA, 57 bp, Artificial Sequence
  source: /note="Description of Artificial Sequence: Synthetic primer"
  modified_base (24)..(31): a, c, t, g, unknown or other
ccgggagctgcatgtgtcagaggnnnnnnnnatacccaagacagagagctgggttcc

SEQ ID NO: 5617 - DNA, 60 bp, Artificial Sequence
  source: /note="Description of Artificial Sequence: Synthetic primer"
  modified_base (24)..(31): a, c, t, g, unknown or other
ccgggagctgcatgtgtcagaggnnnnnnnnaacttacctaggatggagagtcgagtccc

SEQ ID NO: 5618 - DNA, 53 bp, Artificial Sequence
  source: /note="Description of Artificial Sequence: Synthetic primer"
  modified_base (24)..(31): a, c, t, g, unknown or other
ccgggagctgcatgtgtcagaggnnnnnnnnctgtcacagtgagcctggtccc

SEQ ID NO: 5619 - DNA, 49 bp, Artificial Sequence
  source: /note="Description of Artificial Sequence: Synthetic primer"
  modified_base (24)..(31): a, c, t, g, unknown or other
ccgggagctgcatgtgtcagaggnnnnnnnncacggtgagccgtgtccc

SEQ ID NO: 5620 - DNA, 53 bp, Artificial Sequence
  source: /note="Description of Artificial Sequence: Synthetic primer"
  modified_base (24)..(31): a, c, t, g, unknown or other
ccgggagctgcatgtgtcagaggnnnnnnnnccagtacggtcagcctagagcc

SEQ ID NO: 5621 - DNA, 49 bp, Artificial Sequence
  source: /note="Description of Artificial Sequence: Synthetic primer"
  modified_base (24)..(31): a, c, t, g, unknown or other
ccgggagctgcatgtgtcagaggnnnnnnnncactgtcagccgggtgcc

SEQ ID NO: 5622 - DNA, 49 bp, Artificial Sequence
  source: /note="Description of Artificial Sequence: Synthetic primer"
  modified_base (24)..(31): a, c, t, g, unknown or other
ccgggagctgcatgtgtcagaggnnnnnnnncactgagagccgggtccc

SEQ ID NO: 5623 - DNA, 48 bp, Artificial Sequence
  source: /note="Description of Artificial Sequence: Synthetic primer"
  modified_base (24)..(31): a, c, t, g, unknown or other
ccgggagctgcatgtgtcagaggnnnnnnnnaccaggagccgcgtgcc

SEQ ID NO: 5624 - DNA, 49 bp, Artificial Sequence
  source: /note="Description of Artificial Sequence: Synthetic primer"
  modified_base (24)..(31): a, c, t, g, unknown or other
ccgggagctgcatgtgtcagaggnnnnnnnncacggtcagcctgctgcc

SEQ ID NO: 5625 - DNA, 49 bp, Artificial Sequence
  source: /note="Description of Artificial Sequence: Synthetic primer"
  modified_base (24)..(31): a, c, t, g, unknown or other
ccgggagctgcatgtgtcagaggnnnnnnnngaccgtgagcctggtgcc

SEQ ID NO: 5626 - DNA, 49 bp, Artificial Sequence
  source: /note="Description of Artificial Sequence: Synthetic primer"
gggctggcaagccacgtttggtggaatgccctgacagctctcgcttata

SEQ ID NO: 5627 - DNA, 64 bp, Artificial Sequence
  source: /note="Description of Artificial Sequence: Synthetic primer"
gggctggcaagccacgtttggtgctcagagaagtctgaaatattcgatgatcaattctcagttg

SEQ ID NO: 5628 - DNA, 57 bp, Artificial Sequence
  source: /note="Description of Artificial Sequence: Synthetic primer"
gggctggcaagccacgtttggtgccaaatcgmttctcacctaaatctccagacaaag

SEQ ID NO: 5629 - DNA, 49 bp, Artificial Sequence
  source: /note="Description of Artificial Sequence: Synthetic primer"
gggctggcaagccacgtttggtgcacctgactctccagacaaagctcat

SEQ ID NO: 5630 - DNA, 45 bp, Artificial Sequence
  source: /note="Description of Artificial Sequence: Synthetic primer"
gggctggcaagccacgtttggtgcctgaatgccccaacagctctc

SEQ ID NO: 5631 - DNA, 47 bp, Artificial Sequence
  source: /note="Description of Artificial Sequence: Synthetic primer"
gggctggcaagccacgtttggtggattctcagggcgccagttctcta

SEQ ID NO: 5632 - DNA, 54 bp, Artificial Sequence
  source: /note="Description of Artificial Sequence: Synthetic primer"
gggctggcaagccacgtttggtgcctaattgattctcagctcaccacgtccata

SEQ ID NO: 5633 - DNA, 42 bp, Artificial Sequence
  source: /note="Description of Artificial Sequence: Synthetic primer"
gggctggcaagccacgtttggtgtcagggcgccagttccatg

SEQ ID NO: 5634 - DNA, 52 bp, Artificial Sequence
  source: /note="Description of Artificial Sequence: Synthetic primer"
gggctggcaagccacgtttggtgtcctagattctcaggtctccagttcccta

SEQ ID NO: 5635 - DNA, 51 bp, Artificial Sequence
  source: /note="Description of Artificial Sequence: Synthetic primer"
gggctggcaagccacgtttggtggaggaaacttccctgatcgattctcagc

SEQ ID NO: 5636 - DNA, 50 bp, Artificial Sequence
  source: /note="Description of Artificial Sequence: Synthetic primer"
gggctggcaagccacgtttggtgcaacttccctgatcgattctcaggtca

SEQ ID NO: 5637 - DNA, 53 bp, Artificial Sequence
  source: /note="Description of Artificial Sequence: Synthetic primer"
gggctggcaagccacgtttggtgaggaaacttccctgatcaattctcaggtca

SEQ ID NO: 5638 - DNA, 52 bp, Artificial Sequence
  source: /note="Description of Artificial Sequence: Synthetic primer"
gggctggcaagccacgtttggtgggaaacttccctcctagattttcaggtcg

SEQ ID NO: 5639 - DNA, 50 bp, Artificial Sequence
  source: /note="Description of Artificial Sequence: Synthetic primer"
gggctggcaagccacgtttggtgccccaatggctacaatgtctccagatt

SEQ ID NO: 5640 - DNA, 46 bp, Artificial Sequence
  source: /note="Description of Artificial Sequence: Synthetic primer"
gggctggcaagccacgtttggtgggagaggtccctgatggctacaa

SEQ ID NO: 5641 - DNA, 51 bp, Artificial Sequence
  source: /note="Description of Artificial Sequence: Synthetic primer"
gggctggcaagccacgtttggtgtccctgatggttatagtgtctccagagc

SEQ ID NO: 5642 - DNA, 50 bp, Artificial Sequence
  source: /note="Description of Artificial Sequence: Synthetic primer"
gggctggcaagccacgtttggtgggagaagtccccaatggctacaatgtc

SEQ ID NO: 5643 - DNA, 49 bp, Artificial Sequence
  source: /note="Description of Artificial Sequence: Synthetic primer"
gggctggcaagccacgtttggtgaaaggagaagtcccgaatggctacaa

SEQ ID NO: 5644 - DNA, 52 bp, Artificial Sequence
  source: /note="Description of Artificial Sequence: Synthetic primer"
gggctggcaagccacgtttggtggttcccaatggctacaatgtctccagatc

SEQ ID NO: 5645 - DNA, 55 bp, Artificial Sequence
  source: /note="Description of Artificial Sequence: Synthetic primer"
gggctggcaagccacgtttggtggaagtccccaatggctacaatgtctctagatt

SEQ ID NO: 5646 - DNA, 49 bp, Artificial Sequence
  source: /note="Description of Artificial Sequence: Synthetic primer"
gggctggcaagccacgtttggtggagaagtccccgatggctacaatgta

SEQ ID NO: 5647 - DNA, 47 bp, Artificial Sequence
  source: /note="Description of Artificial Sequence: Synthetic primer"
gggctggcaagccacgtttggtggtgatcggttctctgcacagaggt

SEQ ID NO: 5648 - DNA, 46 bp, Artificial Sequence
  source: /note="Description of Artificial Sequence: Synthetic primer"
gggctggcaagccacgtttggtgcgcttctctgcagagaggactgg

SEQ ID NO: 5649 - DNA, 45 bp, Artificial Sequence
  source: /note="Description of Artificial Sequence: Synthetic primer"
gggctggcaagccacgtttggtgggttctttgcagtcaggcctga

SEQ ID NO: 5650 - DNA, 45 bp, Artificial Sequence
  source: /note="Description of Artificial Sequence: Synthetic primer"
gggctggcaagccacgtttggtgcagtggtcggttctctgcagag

SEQ ID NO: 5651 - DNA, 52 bp, Artificial Sequence
  source: /note="Description of Artificial Sequence: Synthetic primer"
gggctggcaagccacgtttggtggctcagtgatcaattctccacagagaggt

SEQ ID NO: 5652 - DNA, 45 bp, Artificial Sequence
  source: /note="Description of Artificial Sequence: Synthetic primer"
gggctggcaagccacgtttggtgttctctgcagagaggcctgagg

SEQ ID NO: 5653 - DNA, 48 bp, Artificial Sequence
  source: /note="Description of Artificial Sequence: Synthetic primer"
gggctggcaagccacgtttggtgcccagtgatcgcttctttgcagaaa

SEQ ID NO: 5654 - DNA, 46 bp, Artificial Sequence
  source: /note="Description of Artificial Sequence: Synthetic primer"
gggctggcaagccacgtttggtgctgcagagaggcctaagggatct

SEQ ID NO: 5655 - DNA, 56 bp, Artificial Sequence
  source: /note="Description of Artificial Sequence: Synthetic primer"
gggctggcaagccacgtttggtggaagggtacaatgtctctggaaacaaactcaag

SEQ ID NO: 5656 - DNA, 54 bp, Artificial Sequence
  source: /note="Description of Artificial Sequence: Synthetic primer"
gggctggcaagccacgtttggtgggggtactgtgtttcttgaaacaagcttgag

SEQ ID NO: 5657 - DNA, 53 bp, Artificial Sequence
  source: /note="Description of Artificial Sequence: Synthetic primer"
gggctggcaagccacgtttggtgcagttccctgacttgcactctgaactaaac

SEQ ID NO: 5658 - DNA, 55 bp, Artificial Sequence
  source: /note="Description of Artificial Sequence: Synthetic primer"
gggctggcaagccacgtttggtgactaacaaaggagaagtctcagatggctacag

SEQ ID NO: 5659 - DNA, 50 bp, Artificial Sequence
  source: /note="Description of Artificial Sequence: Synthetic primer"
gggctggcaagccacgtttggtgagataaaggagaagtccccgatggcta

SEQ ID NO: 5660 - DNA, 58 bp, Artificial Sequence
  source: /note="Description of Artificial Sequence: Synthetic primer"
gggctggcaagccacgtttggtggatactgacaaaggagaagtctcagatggctatag

SEQ ID NO: 5661 - DNA, 52 bp, Artificial Sequence
  source: /note="Description of Artificial Sequence: Synthetic primer"
gggctggcaagccacgtttggtgctaaggatcgattttctgcagagaggctc

SEQ ID NO: 5662 - DNA, 50 bp, Artificial Sequence
  source: /note="Description of Artificial Sequence: Synthetic primer"
gggctggcaagccacgtttggtgttgattctcagcacagatgcctgatgt

SEQ ID NO: 5663 - DNA, 47 bp, Artificial Sequence
  source: /note="Description of Artificial Sequence: Synthetic primer"
gggctggcaagccacgtttggtgattctcagctgagaggcctgatgg

SEQ ID NO: 5664 - DNA, 53 bp, Artificial Sequence
  source: /note="Description of Artificial Sequence: Synthetic primer"
gggctggcaagccacgtttggtgggatcgattctcagctaagatgcctaatgc

SEQ ID NO: 5665 - DNA, 51 bp, Artificial Sequence
  source: /note="Description of Artificial Sequence: Synthetic primer"
gggctggcaagccacgtttggtgctcagcagagatgcctgatgcaacttta

SEQ ID NO: 5666 - DNA, 52 bp, Artificial Sequence
  source: /note="Description of Artificial Sequence: Synthetic primer"
gggctggcaagccacgtttggtgctgatcgattctcagctcaacagttcagt

SEQ ID NO: 5667 - DNA, 49 bp, Artificial Sequence
  source: /note="Description of Artificial Sequence: Synthetic primer"
gggctggcaagccacgtttggtgtagctgaaaggactggagggacgtat

SEQ ID NO: 5668 - DNA, 47 bp, Artificial Sequence
  source: /note="Description of Artificial Sequence: Synthetic primer"
gggctggcaagccacgtttggtgccaggaggccgaacacttctttct

SEQ ID NO: 5669 - DNA, 48 bp, Artificial Sequence
  source: /note="Description of Artificial Sequence: Synthetic primer"
gggctggcaagccacgtttggtggctaagtgcctcccaaattcaccct

SEQ ID NO: 5670 - DNA, 49 bp, Artificial Sequence
  source: /note="Description of Artificial Sequence: Synthetic primer"
gggctggcaagccacgtttggtgcacagctgaaagacctaacggaacgt

SEQ ID NO: 5671 - DNA, 47 bp, Artificial Sequence
  source: /note="Description of Artificial Sequence: Synthetic primer"
gggctggcaagccacgtttggtgctgctgaatttcccaaagagggcc

SEQ ID NO: 5672 - DNA, 43 bp, Artificial Sequence
  source: /note="Description of Artificial Sequence: Synthetic primer"
gggctggcaagccacgtttggtgagggtacagcgtctctcggg

SEQ ID NO: 5673 - DNA, 46 bp, Artificial Sequence
  source: /note="Description of Artificial Sequence: Synthetic primer"
gggctggcaagccacgtttggtggcctgaccttgtccactctgaca

SEQ ID NO: 5674 - DNA, 50 bp, Artificial Sequence
  source: /note="Description of Artificial Sequence: Synthetic primer"
gggctggcaagccacgtttggtgatgagcgatttttagcccaatgctcca

SEQ ID NO: 5675 - DNA, 47 bp, Artificial Sequence
  source: /note="Description of Artificial Sequence: Synthetic primer"
gggctggcaagccacgtttggtgtgaaggctacgtgtctgccaagag

SEQ ID NO: 5676 - DNA, 47 bp, Artificial Sequence
  source: /note="Description of Artificial Sequence: Synthetic primer"
gggctggcaagccacgtttggtgctcatctcaatgccccaagaacgc

SEQ ID NO: 5677 - DNA, 54 bp, Artificial Sequence
  source: /note="Description of Artificial Sequence: Synthetic primer"
gggctggcaagccacgtttggtgagatctctgatggatacagtgtctctcgaca

SEQ ID NO: 5678 - DNA, 57 bp, Artificial Sequence
  source: /note="Description of Artificial Sequence: Synthetic primer"
gggctggcaagccacgtttggtgagatctttcctctgagtcaacagtctccagaata

SEQ ID NO: 5679 - DNA, 58 bp, Artificial Sequence
  source: /note="Description of Artificial Sequence: Synthetic primer"
gggctggcaagccacgtttggtgcactgaaaaaggagatatctctgaggggtatcatg

SEQ ID NO: 5680 - DNA, 54 bp, Artificial Sequence
  source: /note="Description of Artificial Sequence: Synthetic primer"
gggctggcaagccacgtttggtggttcctgaagggtacaaagtctctcgaaaag

SEQ ID NO: 5681 - DNA, 50 bp, Artificial Sequence
  source: /note="Description of Artificial Sequence: Synthetic primer"
gggctggcaagccacgtttggtgctgaggggtacagtgtctctagagaga

SEQ ID NO: 5682 - DNA, 48 bp, Artificial Sequence
  source: /note="Description of Artificial Sequence: Synthetic primer"
gggctggcaagccacgtttggtgagccgcccaaacctaacattctcaa

SEQ ID NO: 5683 - DNA, 41 bp, Artificial Sequence
  source: /note="Description of Artificial Sequence: Synthetic primer"
gggctggcaagccacgtttggtgcccaggaccggcagttca

SEQ ID NO: 5684 - DNA, 63 bp, Artificial Sequence
  source: /note="Description of Artificial Sequence: Synthetic primer"
gggctggcaagccacgtttggtgttgattagagacatatccctattgaaaatatttcctggca

SEQ ID NO: 5685 - DNA, 54 bp, Artificial Sequence
  source: /note="Description of Artificial Sequence: Synthetic primer"
gggctggcaagccacgtttggtgagatgccctgagtcagcatagtcattctaac

SEQ ID NO: 5686 - DNA, 103 bp, Artificial Sequence; identical to SEQ ID NO: 5387
  source: /note="Description of Artificial Sequence: Synthetic primer"
  modified_base (67)..(72): a, c, t, g, unknown or other

SEQ ID NO: 5687 - DNA, 103 bp, Artificial Sequence; identical to SEQ ID NO: 5388
  source: /note="Description of Artificial Sequence: Synthetic primer"
  modified_base (67)..(72): a, c, t, g, unknown or other

SEQ ID NO: 5688 - DNA, 103 bp, Artificial Sequence; identical to SEQ ID NO: 5389
  source: /note="Description of Artificial Sequence: Synthetic primer"
  modified_base (67)..(72): a, c, t, g, unknown or other

SEQ ID NO: 5689 - DNA, 103 bp, Artificial Sequence; identical to SEQ ID NO: 5390
  source: /note="Description of Artificial Sequence: Synthetic primer"
  modified_base (67)..(72): a, c, t, g, unknown or other

SEQ ID NO: 5690 - DNA, 103 bp, Artificial Sequence; identical to SEQ ID NO: 5391
  source: /note="Description of Artificial Sequence: Synthetic primer"
  modified_base (67)..(72): a, c, t, g, unknown or other

SEQ ID NO: 5691 - DNA, 103 bp, Artificial Sequence; identical to SEQ ID NO: 5392
  source: /note="Description of Artificial Sequence: Synthetic primer"
  modified_base (67)..(72): a, c, t, g, unknown or other

SEQ ID NO: 5692 - DNA, 103 bp, Artificial Sequence; identical to SEQ ID NO: 5393
  source: /note="Description of Artificial Sequence: Synthetic primer"
  modified_base (67)..(72): a, c, t, g, unknown or other

SEQ ID NO: 5693 - DNA, 103 bp, Artificial Sequence; identical to SEQ ID NO: 5394
  source: /note="Description of Artificial Sequence: Synthetic primer"
  modified_base (67)..(72): a, c, t, g, unknown or other

SEQ ID NO: 5694 - DNA, 103 bp, Artificial Sequence; identical to SEQ ID NO: 5395
  source: /note="Description of Artificial Sequence: Synthetic primer"
  modified_base (67)..(72): a, c, t, g, unknown or other

SEQ ID NO: 5695 - DNA, 103 bp, Artificial Sequence; identical to SEQ ID NO: 5396
  source: /note="Description of Artificial Sequence: Synthetic primer"
  modified_base (67)..(72): a, c, t, g, unknown or other

SEQ ID NO: 5696 - DNA, 103 bp, Artificial Sequence; identical to SEQ ID NO: 5397
  source: /note="Description of Artificial Sequence: Synthetic primer"
  modified_base (67)..(72): a, c, t, g, unknown or other

SEQ ID NO: 5697 - DNA, 103 bp, Artificial Sequence; identical to SEQ ID NO: 5398
  source: /note="Description of Artificial Sequence: Synthetic primer"
  modified_base (67)..(72): a, c, t, g, unknown or other

SEQ ID NO: 5698 - DNA, 103 bp, Artificial Sequence; identical to SEQ ID NO: 5399
  source: /note="Description of Artificial Sequence: Synthetic primer"
  modified_base (67)..(72): a, c, t, g, unknown or other

SEQ ID NO: 5699 - DNA, 103 bp, Artificial Sequence; identical to SEQ ID NO: 5400
  source: /note="Description of Artificial Sequence: Synthetic primer"
  modified_base (67)..(72): a, c, t, g, unknown or other

SEQ ID NO: 5700 - DNA, 103 bp, Artificial Sequence; identical to SEQ ID NO: 5401
  source: /note="Description of Artificial Sequence: Synthetic primer"
  modified_base (67)..(72): a, c, t, g, unknown or other

SEQ ID NO: 5701 - DNA, 103 bp, Artificial Sequence; identical to SEQ ID NO: 5402
  source: /note="Description of Artificial Sequence: Synthetic primer"
  modified_base (67)..(72): a, c, t, g, unknown or other

SEQ ID NO: 5702 - DNA, 103 bp, Artificial Sequence; identical to SEQ ID NO: 5403
  source: /note="Description of Artificial Sequence: Synthetic primer"
  modified_base (67)..(72): a, c, t, g, unknown or other

SEQ ID NO: 5703 - DNA, 103 bp, Artificial Sequence; identical to SEQ ID NO: 5404
  source: /note="Description of Artificial Sequence: Synthetic primer"
  modified_base (67)..(72): a, c, t, g, unknown or other

SEQ ID NO: 5704 - DNA, 103 bp, Artificial Sequence; identical to SEQ ID NO: 5405
  source: /note="Description of Artificial Sequence: Synthetic primer"
  modified_base (67)..(72): a, c, t, g, unknown or other

SEQ ID NO: 5705 - DNA, 103 bp, Artificial Sequence; identical to SEQ ID NO: 5406
  source: /note="Description of Artificial Sequence: Synthetic primer"
  modified_base (67)..(72): a, c, t, g, unknown or other

SEQ ID NO: 5706 - DNA, 103 bp, Artificial Sequence; identical to SEQ ID NO: 5407
  source: /note="Description of Artificial Sequence: Synthetic primer"
  modified_base (67)..(72): a, c, t, g, unknown or other

SEQ ID NO: 5707 - DNA, 103 bp, Artificial Sequence; identical to SEQ ID NO: 5408
  source: /note="Description of Artificial Sequence: Synthetic primer"
  modified_base (67)..(72): a, c, t, g, unknown or other

SEQ ID NO: 5708 - DNA, 103 bp, Artificial Sequence; identical to SEQ ID NO: 5409
  source: /note="Description of Artificial Sequence: Synthetic primer"
  modified_base (67)..(72): a, c, t, g, unknown or other

SEQ ID NO: 5709 - DNA, 103 bp, Artificial Sequence; identical to SEQ ID NO: 5410
  source: /note="Description of Artificial Sequence: Synthetic primer"
  modified_base (67)..(72): a, c, t, g, unknown or other

SEQ ID NO: 5710 - DNA, 103 bp, Artificial Sequence; identical to SEQ ID NO: 5411
  source: /note="Description of Artificial Sequence: Synthetic primer"
  modified_base (67)..(72): a, c, t, g, unknown or other

SEQ ID NO: 5711 - DNA, 103 bp, Artificial Sequence; identical to SEQ ID NO: 5412
  source: /note="Description of Artificial Sequence: Synthetic primer"
  modified_base (67)..(72): a, c, t, g, unknown or other

SEQ ID NO: 5712 - DNA, 103 bp, Artificial Sequence; identical to SEQ ID NO: 5413
  source: /note="Description of Artificial Sequence: Synthetic primer"
  modified_base (67)..(72): a, c, t, g, unknown or other

SEQ ID NO: 5713 - DNA, 103 bp, Artificial Sequence; identical to SEQ ID NO: 5414
  source: /note="Description of Artificial Sequence: Synthetic primer"
  modified_base (67)..(72): a, c, t, g, unknown or other

SEQ ID NO: 5714 - DNA, 103 bp, Artificial Sequence; identical to SEQ ID NO: 5415
  source: /note="Description of Artificial Sequence: Synthetic primer"
  modified_base (67)..(72): a, c, t, g, unknown or other

SEQ ID NO: 5715 - DNA, 103 bp, Artificial Sequence; identical to SEQ ID NO: 5416
  source: /note="Description of Artificial Sequence: Synthetic primer"
  modified_base (67)..(72): a, c, t, g, unknown or other

SEQ ID NO: 5716 - DNA, 103 bp, Artificial Sequence; identical to SEQ ID NO: 5417
  source: /note="Description of Artificial Sequence: Synthetic primer"
  modified_base (67)..(72): a, c, t, g, unknown or other

SEQ ID NO: 5717 - DNA, 103 bp, Artificial Sequence; identical to SEQ ID NO: 5418
  source: /note="Description of Artificial Sequence: Synthetic primer"
  modified_base (67)..(72): a, c, t, g, unknown or other

SEQ ID NO: 5718 - DNA, 103 bp, Artificial Sequence; identical to SEQ ID NO: 5419
  source: /note="Description of Artificial Sequence: Synthetic primer"
  modified_base (67)..(72): a, c, t, g, unknown or other

SEQ ID NO: 5719 - DNA, 103 bp, Artificial Sequence; identical to SEQ ID NO: 5420
  source: /note="Description of Artificial Sequence: Synthetic primer"
  modified_base (67)..(72): a, c, t, g, unknown or other

SEQ ID NO: 5720 - DNA, 103 bp, Artificial Sequence; identical to SEQ ID NO: 5421
  source: /note="Description of Artificial Sequence: Synthetic primer"
  modified_base (67)..(72): a, c, t, g, unknown or other

SEQ ID NO: 5721 - DNA, 103 bp, Artificial Sequence; identical to SEQ ID NO: 5422
  source: /note="Description of Artificial Sequence: Synthetic primer"
  modified_base (67)..(72): a, c, t, g, unknown or other

SEQ ID NO: 5722 - DNA, 103 bp, Artificial Sequence; identical to SEQ ID NO: 5423
  source: /note="Description of Artificial Sequence: Synthetic primer"
  modified_base (67)..(72): a, c, t, g, unknown or other

SEQ ID NO: 5723 - DNA, 103 bp, Artificial Sequence; identical to SEQ ID NO: 5424
  source: /note="Description of Artificial Sequence: Synthetic primer"
  modified_base (67)..(72): a, c, t, g, unknown or other

SEQ ID NO: 5724 - DNA, 103 bp, Artificial Sequence; identical to SEQ ID NO: 5425
  source: /note="Description of Artificial Sequence: Synthetic primer"
  modified_base (67)..(72): a, c, t, g, unknown or other

SEQ ID NO: 5725 - DNA, 103 bp, Artificial Sequence; identical to SEQ ID NO: 5426
  source: /note="Description of Artificial Sequence: Synthetic primer"
  modified_base (67)..(72): a, c, t, g, unknown or other

SEQ ID NO: 5726 - DNA, 103 bp, Artificial Sequence; identical to SEQ ID NO: 5427
  source: /note="Description of Artificial Sequence: Synthetic primer"
  modified_base (67)..(72): a, c, t, g, unknown or other

SEQ ID NO: 5727 - DNA, 103 bp, Artificial Sequence; identical to SEQ ID NO: 5428
  source: /note="Description of Artificial Sequence: Synthetic primer"
  modified_base (67)..(72): a, c, t, g, unknown or other

SEQ ID NO: 5728 - DNA, 103 bp, Artificial Sequence; identical to SEQ ID NO: 5429
  source: /note="Description of Artificial Sequence: Synthetic primer"
  modified_base (67)..(72): a, c, t, g, unknown or other

SEQ ID NO: 5729 - DNA, 103 bp, Artificial Sequence; identical to SEQ ID NO: 5430
  source: /note="Description of Artificial Sequence: Synthetic primer"
  modified_base (67)..(72): a, c, t, g, unknown or other

SEQ ID NO: 5730 - DNA, 103 bp, Artificial Sequence; identical to SEQ ID NO: 5431
  source: /note="Description of Artificial Sequence: Synthetic primer"
  modified_base (67)..(72): a, c, t, g, unknown or other

SEQ ID NO: 5731 - DNA, 103 bp, Artificial Sequence; identical to SEQ ID NO: 5432
  source: /note="Description of Artificial Sequence: Synthetic primer"
  modified_base (67)..(72): a, c, t, g, unknown or other

SEQ ID NO: 5732 - DNA, 103 bp, Artificial Sequence; identical to SEQ ID NO: 5433
  source: /note="Description of Artificial Sequence: Synthetic primer"
  modified_base (67)..(72): a, c, t, g, unknown or other

SEQ ID NO: 5733 - DNA, 103 bp, Artificial Sequence; identical to SEQ ID NO: 5434
  source: /note="Description of Artificial Sequence: Synthetic primer"
  modified_base (67)..(72): a, c, t, g, unknown or other

SEQ ID NO: 5734 - DNA, 103 bp, Artificial Sequence; identical to SEQ ID NO: 5435
  source: /note="Description of Artificial Sequence: Synthetic primer"
  modified_base (67)..(72): a, c, t, g, unknown or other

SEQ ID NO: 5735 - DNA, 103 bp, Artificial Sequence; identical to SEQ ID NO: 5436
  source: /note="Description of Artificial Sequence: Synthetic primer"
  modified_base (67)..(72): a, c, t, g, unknown or other

SEQ ID NO: 5736 - DNA, 103 bp, Artificial Sequence; identical to SEQ ID NO: 5437
  source: /note="Description of Artificial Sequence: Synthetic primer"
  modified_base (67)..(72): a, c, t, g, unknown or other

SEQ ID NO: 5737 - DNA, 103 bp, Artificial Sequence; identical to SEQ ID NO: 5438
  source: /note="Description of Artificial Sequence: Synthetic primer"
  modified_base (67)..(72): a, c, t, g, unknown or other

SEQ ID NO: 5738 - DNA, 103 bp, Artificial Sequence; identical to SEQ ID NO: 5439
  source: /note="Description of Artificial Sequence: Synthetic primer"
  modified_base (67)..(72): a, c, t, g, unknown or other

SEQ ID NO: 5739 - DNA, 103 bp, Artificial Sequence; identical to SEQ ID NO: 5440
  source: /note="Description of Artificial Sequence: Synthetic primer"
  modified_base (67)..(72): a, c, t, g, unknown or other

SEQ ID NO: 5740 - DNA, 103 bp, Artificial Sequence; identical to SEQ ID NO: 5441
  source: /note="Description of Artificial Sequence: Synthetic primer"
  modified_base (67)..(72): a, c, t, g, unknown or other

SEQ ID NO: 5741 - DNA, 103 bp, Artificial Sequence; identical to SEQ ID NO: 5442
  source: /note="Description of Artificial Sequence: Synthetic primer"
  modified_base (67)..(72): a, c, t, g, unknown or other

SEQ ID NO: 5742 - DNA, 103 bp, Artificial Sequence; identical to SEQ ID NO: 5443
  source: /note="Description of Artificial Sequence: Synthetic primer"
  modified_base (67)..(72): a, c, t, g, unknown or other

SEQ ID NO: 5743 - DNA, 103 bp, Artificial Sequence; identical to SEQ ID NO: 5444
  source: /note="Description of Artificial Sequence: Synthetic primer"
  modified_base (67)..(72): a, c, t, g, unknown or other

SEQ ID NO: 5744 - DNA, 103 bp, Artificial Sequence; identical to SEQ ID NO: 5445
  source: /note="Description of Artificial Sequence: Synthetic primer"
  modified_base (67)..(72): a, c, t, g, unknown or other

SEQ ID NO: 5745 - DNA, 103 bp, Artificial Sequence; identical to SEQ ID NO: 5446
  source: /note="Description of Artificial Sequence: Synthetic primer"
  modified_base (67)..(72): a, c, t, g, unknown or other

SEQ ID NO: 5746 - DNA, 103 bp, Artificial Sequence; identical to SEQ ID NO: 5447
  source: /note="Description of Artificial Sequence: Synthetic primer"
  modified_base (67)..(72): a, c, t, g, unknown or other

SEQ ID NO: 5747 - DNA, 103 bp, Artificial Sequence; identical to SEQ ID NO: 5448
  source: /note="Description of Artificial Sequence: Synthetic primer"
  modified_base (67)..(72): a, c, t, g, unknown or other

SEQ ID NO: 5748 - DNA, 103 bp, Artificial Sequence; identical to SEQ ID NO: 5449
  source: /note="Description of Artificial Sequence: Synthetic primer"
  modified_base (67)..(72): a, c, t, g, unknown or other

SEQ ID NO: 5749 - DNA, 103 bp, Artificial Sequence; identical to SEQ ID NO: 5450
  source: /note="Description of Artificial Sequence: Synthetic primer"
  modified_base (67)..(72): a, c, t, g, unknown or other

SEQ ID NO: 5750 - DNA, 103 bp, Artificial Sequence; identical to SEQ ID NO: 5451
  source: /note="Description of Artificial Sequence: Synthetic primer"
  modified_base (67)..(72): a, c, t, g, unknown or other

SEQ ID NO: 5751 - DNA, 103 bp, Artificial Sequence; identical to SEQ ID NO: 5452
  source: /note="Description of Artificial Sequence: Synthetic primer"
  modified_base (67)..(72): a, c, t, g, unknown or other

SEQ ID NO: 5752 - DNA, 103 bp, Artificial Sequence; identical to SEQ ID NO: 5453
  source: /note="Description of Artificial Sequence: Synthetic primer"
  modified_base (67)..(72): a, c, t, g, unknown or other

SEQ ID NO: 5753 - DNA, 103 bp, Artificial Sequence; identical to SEQ ID NO: 5454
  source: /note="Description of Artificial Sequence: Synthetic primer"
  modified_base (67)..(72): a, c, t, g, unknown or other

SEQ ID NO: 5754 - DNA, 103 bp, Artificial Sequence; identical to SEQ ID NO: 5455
  source: /note="Description of Artificial Sequence: Synthetic primer"
  modified_base (67)..(72): a, c, t, g, unknown or other

SEQ ID NO: 5755 - DNA, 103 bp, Artificial Sequence; identical to SEQ ID NO: 5456
  source: /note="Description of Artificial Sequence: Synthetic primer"
  modified_base (67)..(72): a, c, t, g, unknown or other

SEQ ID NO: 5756 - DNA, 103 bp, Artificial Sequence; identical to SEQ ID NO: 5457
  source: /note="Description of Artificial Sequence: Synthetic primer"
  modified_base (67)..(72): a, c, t, g, unknown or other

SEQ ID NO: 5757 - DNA, 103 bp, Artificial Sequence; identical to SEQ ID NO: 5458
  source: /note="Description of Artificial Sequence: Synthetic primer"
  modified_base (67)..(72): a, c, t, g, unknown or other

SEQ ID NO: 5758 - DNA, 103 bp, Artificial Sequence; identical to SEQ ID NO: 5459
  source: /note="Description of Artificial Sequence: Synthetic primer"
  modified_base (67)..(72): a, c, t, g, unknown or other

SEQ ID NO: 5759 - DNA, 103 bp, Artificial Sequence; identical to SEQ ID NO: 5460
  source: /note="Description of Artificial Sequence: Synthetic primer"
  modified_base (67)..(72): a, c, t, g, unknown or other

SEQ ID NO: 5760 - DNA, 103 bp, Artificial Sequence; identical to SEQ ID NO: 5461
  source: /note="Description of Artificial Sequence: Synthetic primer"
  modified_base (67)..(72): a, c, t, g, unknown or other

SEQ ID NO: 5761 - DNA, 103 bp, Artificial Sequence; identical to SEQ ID NO: 5462
  source: /note="Description of Artificial Sequence: Synthetic primer"
  modified_base (67)..(72): a, c, t, g, unknown or other

SEQ ID NO: 5762 - DNA, 103 bp, Artificial Sequence; identical to SEQ ID NO: 5463
  source: /note="Description of Artificial Sequence: Synthetic primer"
  modified_base (67)..(72): a, c, t, g, unknown or other

SEQ ID NO: 5763 - DNA, 103 bp, Artificial Sequence; identical to SEQ ID NO: 5464
  source: /note="Description of Artificial Sequence: Synthetic primer"
  modified_base (67)..(72): a, c, t, g, unknown or other

SEQ ID NO: 5764 - DNA, 103 bp, Artificial Sequence; identical to SEQ ID NO: 5465
  source: /note="Description of Artificial Sequence: Synthetic primer"
  modified_base (67)..(72): a, c, t, g, unknown or other

SEQ ID NO: 5765 - DNA, 103 bp, Artificial Sequence; identical to SEQ ID NO: 5466
  source: /note="Description of Artificial Sequence: Synthetic primer"
  modified_base (67)..(72): a, c, t, g, unknown or other

SEQ ID NO: 5766 - DNA, 103 bp, Artificial Sequence; identical to SEQ ID NO: 5467
  source: /note="Description of Artificial Sequence: Synthetic primer"
  modified_base (67)..(72): a, c, t, g, unknown or other

SEQ ID NO: 5767 - DNA, 103 bp, Artificial Sequence; identical to SEQ ID NO: 5468
  source: /note="Description of Artificial Sequence: Synthetic primer"
  modified_base (67)..(72): a, c, t, g, unknown or other

SEQ ID NO: 5768 - DNA, 103 bp, Artificial Sequence; identical to SEQ ID NO: 5469
  source: /note="Description of Artificial Sequence: Synthetic primer"
  modified_base (67)..(72): a, c, t, g, unknown or other

SEQ ID NO: 5769 - DNA, 103 bp, Artificial Sequence; identical to SEQ ID NO: 5470
  source: /note="Description of Artificial Sequence: Synthetic primer"
  modified_base (67)..(72): a, c, t, g, unknown or other

SEQ ID NO: 5770 - DNA, 103 bp, Artificial Sequence; identical to SEQ ID NO: 5471
  source: /note="Description of Artificial Sequence: Synthetic primer"
  modified_base (67)..(72): a, c, t, g, unknown or other

SEQ ID NO: 5771 - DNA, 103 bp, Artificial Sequence; identical to SEQ ID NO: 5472
  source: /note="Description of Artificial Sequence: Synthetic primer"
  modified_base (67)..(72): a, c, t, g, unknown or other

SEQ ID NO: 5772 - DNA, 103 bp, Artificial Sequence; identical to SEQ ID NO: 5473
  source: /note="Description of Artificial Sequence: Synthetic primer"
  modified_base (67)..(72): a, c, t, g, unknown or other

SEQ ID NO: 5773 - DNA, 103 bp, Artificial Sequence; identical to SEQ ID NO: 5474
  source: /note="Description of Artificial Sequence: Synthetic primer"
  modified_base (67)..(72): a, c, t, g, unknown or other

SEQ ID NO: 5774 - DNA, 103 bp, Artificial Sequence; identical to SEQ ID NO: 5475
  source: /note="Description of Artificial Sequence: Synthetic primer"
  modified_base (67)..(72): a, c, t, g, unknown or other

SEQ ID NO: 5775 - DNA, 103 bp, Artificial Sequence; identical to SEQ ID NO: 5476
  source: /note="Description of Artificial Sequence: Synthetic primer"
  modified_base (67)..(72): a, c, t, g, unknown or other

SEQ ID NO: 5776 - DNA, 103 bp, Artificial Sequence; identical to SEQ ID NO: 5477
  source: /note="Description of Artificial Sequence: Synthetic primer"
  modified_base (67)..(72): a, c, t, g, unknown or other

SEQ ID NO: 5777 - DNA, 103 bp, Artificial Sequence; identical to SEQ ID NO: 5478
  source: /note="Description of Artificial Sequence: Synthetic primer"
  modified_base (67)..(72): a, c, t, g, unknown or other

SEQ ID NO: 5778 - DNA, 103 bp, Artificial Sequence; identical to SEQ ID NO: 5479
  source: /note="Description of Artificial Sequence: Synthetic primer"
  modified_base (67)..(72): a, c, t, g, unknown or other

SEQ ID NO: 5779 - DNA, 103 bp, Artificial Sequence; identical to SEQ ID NO: 5480
  source: /note="Description of Artificial Sequence: Synthetic primer"
  modified_base (67)..(72): a, c, t, g, unknown or other

SEQ ID NO: 5780 - DNA, 103 bp, Artificial Sequence; identical to SEQ ID NO: 5481
  source: /note="Description of Artificial Sequence: Synthetic primer"
  modified_base (67)..(72): a, c, t, g, unknown or other

SEQ ID NO: 5781 - DNA, 103 bp, Artificial Sequence; identical to SEQ ID NO: 5482
  source: /note="Description of Artificial Sequence: Synthetic primer"
  modified_base (67)..(72): a, c, t, g, unknown or other

SEQ ID NO: 5782 - DNA, 94 bp, Artificial Sequence; identical to SEQ ID NO: 5483
  source: /note="Description of Artificial Sequence: Synthetic primer"
  modified_base (66)..(71): a, c, t, g, unknown or other

SEQ ID NO: 5783 - DNA, 94 bp, Artificial Sequence; identical to SEQ ID NO: 5484
  source: /note="Description of Artificial Sequence: Synthetic primer"
  modified_base (66)..(71): a, c, t, g, unknown or other

SEQ ID NO: 5784 - DNA, 94 bp, Artificial Sequence; identical to SEQ ID NO: 5485
  source: /note="Description of Artificial Sequence: Synthetic primer"
  modified_base (66)..(71): a, c, t, g, unknown or other

SEQ ID NO: 5785 - DNA, 94 bp, Artificial Sequence; identical to SEQ ID NO: 5486
  source: /note="Description of Artificial Sequence: Synthetic primer"
  modified_base (66)..(71): a, c, t, g, unknown or other

SEQ ID NO: 5786 - DNA, 94 bp, Artificial Sequence; identical to SEQ ID NO: 5487
  source: /note="Description of Artificial Sequence: Synthetic primer"
  modified_base (66)..(71): a, c, t, g, unknown or other

SEQ ID NO: 5787 - DNA, 94 bp, Artificial Sequence; identical to SEQ ID NO: 5488
  source: /note="Description of Artificial Sequence: Synthetic primer"
  modified_base (66)..(71): a, c, t, g, unknown or other

SEQ ID NO: 5788 - DNA, 94 bp, Artificial Sequence; identical to SEQ ID NO: 5489
  source: /note="Description of Artificial Sequence: Synthetic primer"
  modified_base (66)..(71): a, c, t, g, unknown or other

SEQ ID NO: 5789 - DNA, 94 bp, Artificial Sequence; identical to SEQ ID NO: 5490
  source: /note="Description of Artificial Sequence: Synthetic primer"
  modified_base (66)..(71): a, c, t, g, unknown or other

SEQ ID NO: 5790 - DNA, 94 bp, Artificial Sequence; identical to SEQ ID NO: 5491
  source: /note="Description of Artificial Sequence: Synthetic primer"
  modified_base (66)..(71): a, c, t, g, unknown or other

SEQ ID NO: 5791 - DNA, 94 bp, Artificial Sequence; identical to SEQ ID NO: 5492
  source: /note="Description of Artificial Sequence: Synthetic primer"
  modified_base (66)..(71): a, c, t, g, unknown or other

SEQ ID NO: 5792 - DNA, 94 bp, Artificial Sequence; identical to SEQ ID NO: 5493
  source: /note="Description of Artificial Sequence: Synthetic primer"
  modified_base (66)..(71): a, c, t, g, unknown or other

SEQ ID NO: 5793 - DNA, 94 bp, Artificial Sequence; identical to SEQ ID NO: 5494
  source: /note="Description of Artificial Sequence: Synthetic primer"
  modified_base (66)..(71): a, c, t, g, unknown or other

SEQ ID NO: 5794 - DNA, 94 bp, Artificial Sequence; identical to SEQ ID NO: 5495
  source: /note="Description of Artificial Sequence: Synthetic primer"
  modified_base (66)..(71): a, c, t, g, unknown or other

SEQ ID NO: 5795 - DNA, 94 bp, Artificial Sequence; identical to SEQ ID NO: 5496
  source: /note="Description of Artificial Sequence: Synthetic primer"
  modified_base (66)..(71): a, c, t, g, unknown or other

SEQ ID NO: 5796 - DNA, 94 bp, Artificial Sequence; identical to SEQ ID NO: 5497
  source: /note="Description of Artificial Sequence: Synthetic primer"
  modified_base (66)..(71): a, c, t, g, unknown or other

SEQ ID NO: 5797 - DNA, 94 bp, Artificial Sequence; identical to SEQ ID NO: 5498
  source: /note="Description of Artificial Sequence: Synthetic primer"
  modified_base (66)..(71): a, c, t, g, unknown or other

SEQ ID NO: 5798 - DNA, 94 bp, Artificial Sequence; identical to SEQ ID NO: 5499
  source: /note="Description of Artificial Sequence: Synthetic primer"
  modified_base (66)..(71): a, c, t, g, unknown or other

SEQ ID NO: 5799 - DNA, 94 bp, Artificial Sequence; identical to SEQ ID NO: 5500
  source: /note="Description of Artificial Sequence: Synthetic primer"
  modified_base (66)..(71): a, c, t, g, unknown or other

SEQ ID NO: 5800 - DNA, 94 bp, Artificial Sequence; identical to SEQ ID NO: 5501
  source: /note="Description of Artificial Sequence: Synthetic primer"
  modified_base (66)..(71): a, c, t, g, unknown or other

SEQ ID NO: 5801 - DNA, 94 bp, Artificial Sequence; identical to SEQ ID NO: 5502
  source: /note="Description of Artificial Sequence: Synthetic primer"
  modified_base (66)..(71): a, c, t, g, unknown or other

SEQ ID NO: 5802 - DNA, 94 bp, Artificial Sequence; identical to SEQ ID NO: 5503
  source: /note="Description of Artificial Sequence: Synthetic primer"
  modified_base (66)..(71): a, c, t, g, unknown or other

SEQ ID NO: 5803 - DNA, 94 bp, Artificial Sequence; identical to SEQ ID NO: 5504
  source: /note="Description of Artificial Sequence: Synthetic primer"
  modified_base (66)..(71): a, c, t, g, unknown or other

SEQ ID NO: 5804 - DNA, 94 bp, Artificial Sequence; identical to SEQ ID NO: 5505
  source: /note="Description of Artificial Sequence: Synthetic primer"
  modified_base (66)..(71): a, c, t, g, unknown or other

SEQ ID NO: 5805 - DNA, 94 bp, Artificial Sequence; identical to SEQ ID NO: 5506
  source: /note="Description of Artificial Sequence: Synthetic primer"
  modified_base (66)..(71): a, c, t, g, unknown or other

SEQ ID NO: 5806 - DNA, 94 bp, Artificial Sequence; identical to SEQ ID NO: 5507
  source: /note="Description of Artificial Sequence: Synthetic primer"
  modified_base (66)..(71): a, c, t, g, unknown or other

SEQ ID NO: 5807 - DNA, 94 bp, Artificial Sequence; identical to SEQ ID NO: 5508
  source: /note="Description of Artificial Sequence: Synthetic primer"
  modified_base (66)..(71): a, c, t, g, unknown or other

SEQ ID NO: 5808 - DNA, 94 bp, Artificial Sequence; identical to SEQ ID NO: 5509
  source: /note="Description of Artificial Sequence: Synthetic primer"
  modified_base (66)..(71): a, c, t, g, unknown or other

SEQ ID NO: 5809 - DNA, 94 bp, Artificial Sequence; identical to SEQ ID NO: 5510
  source: /note="Description of Artificial Sequence: Synthetic primer"
  modified_base (66)..(71): a, c, t, g, unknown or other

SEQ ID NO: 5810 - DNA, 94 bp, Artificial Sequence; identical to SEQ ID NO: 5511
  source: /note="Description of Artificial Sequence: Synthetic primer"
  modified_base (66)..(71): a, c, t, g, unknown or other

SEQ ID NO: 5811 - DNA, 94 bp, Artificial Sequence; identical to SEQ ID NO: 5512
  source: /note="Description of Artificial Sequence: Synthetic primer"
  modified_base (66)..(71): a, c, t, g, unknown or other

SEQ ID NO: 5812 - DNA, 94 bp, Artificial Sequence; identical to SEQ ID NO: 5513
  source: /note="Description of Artificial Sequence: Synthetic primer"
  modified_base (66)..(71): a, c, t, g, unknown or other

SEQ ID NO: 5813 - DNA, 94 bp, Artificial Sequence; identical to SEQ ID NO: 5514
  source: /note="Description of Artificial Sequence: Synthetic primer"
  modified_base (66)..(71): a, c, t, g, unknown or other

SEQ ID NO: 5814 - DNA, 94 bp, Artificial Sequence; identical to SEQ ID NO: 5515
  source: /note="Description of Artificial Sequence: Synthetic primer"
  modified_base (66)..(71): a, c, t, g, unknown or other

SEQ ID NO: 5815 - DNA, 94 bp, Artificial Sequence; identical to SEQ ID NO: 5516
  source: /note="Description of Artificial Sequence: Synthetic primer"
  modified_base (66)..(71): a, c, t, g, unknown or other

SEQ ID NO: 5816 - DNA, 94 bp, Artificial Sequence; identical to SEQ ID NO: 5517
  source: /note="Description of Artificial Sequence: Synthetic primer"
  modified_base (66)..(71): a, c, t, g, unknown or other

SEQ ID NO: 5817 - DNA, 94 bp, Artificial Sequence; identical to SEQ ID NO: 5518
  source: /note="Description of Artificial Sequence: Synthetic primer"
  modified_base (66)..(71): a, c, t, g, unknown or other

SEQ ID NO: 5818 - DNA, 94 bp, Artificial Sequence; identical to SEQ ID NO: 5519
  source: /note="Description of Artificial Sequence: Synthetic primer"
  modified_base (66)..(71): a, c, t, g, unknown or other

SEQ ID NO: 5819 - DNA, 94 bp, Artificial Sequence; identical to SEQ ID NO: 5520
  source: /note="Description of Artificial Sequence: Synthetic primer"
  modified_base (66)..(71): a, c, t, g, unknown or other

SEQ ID NO: 5820 - DNA, 94 bp, Artificial Sequence; identical to SEQ ID NO: 5521
  source: /note="Description of Artificial Sequence: Synthetic primer"
  modified_base (66)..(71): a, c, t, g, unknown or other

SEQ ID NO: 5821 - DNA, 94 bp, Artificial Sequence; identical to SEQ ID NO: 5522
  source: /note="Description of Artificial Sequence: Synthetic primer"
  modified_base (66)..(71): a, c, t, g, unknown or other

SEQ ID NO: 5822 - DNA, 94 bp, Artificial Sequence; identical to SEQ ID NO: 5523
  source: /note="Description of Artificial Sequence: Synthetic primer"
  modified_base (66)..(71): a, c, t, g, unknown or other

SEQ ID NO: 5823 - DNA, 94 bp, Artificial Sequence; identical to SEQ ID NO: 5524
  source: /note="Description of Artificial Sequence: Synthetic primer"
  modified_base (66)..(71): a, c, t, g, unknown or other

SEQ ID NO: 5824 - DNA, 94 bp, Artificial Sequence; identical to SEQ ID NO: 5525
  source: /note="Description of Artificial Sequence: Synthetic primer"
  modified_base (66)..(71): a, c, t, g, unknown or other

SEQ ID NO: 5825 - DNA, 94 bp, Artificial Sequence; identical to SEQ ID NO: 5526
  source: /note="Description of Artificial Sequence: Synthetic primer"
  modified_base (66)..(71): a, c, t, g, unknown or other

SEQ ID NO: 5826 - DNA, 94 bp, Artificial Sequence; identical to SEQ ID NO: 5527
  source: /note="Description of Artificial Sequence: Synthetic primer"
  modified_base (66)..(71): a, c, t, g, unknown or other

SEQ ID NO: 5827 - DNA, 94 bp, Artificial Sequence; identical to SEQ ID NO: 5528
  source: /note="Description of Artificial Sequence: Synthetic primer"
  modified_base (66)..(71): a, c, t, g, unknown or other

SEQ ID NO: 5828 - DNA, 94 bp, Artificial Sequence; identical to SEQ ID NO: 5529
  source: /note="Description of Artificial Sequence: Synthetic primer"
  modified_base (66)..(71): a, c, t, g, unknown or other

SEQ ID NO: 5829 - DNA, 94 bp, Artificial Sequence; identical to SEQ ID NO: 5530
  source: /note="Description of Artificial Sequence: Synthetic primer"
  modified_base (66)..(71): a, c, t, g, unknown or other

SEQ ID NO: 5830 - DNA, 94 bp, Artificial Sequence; identical to SEQ ID NO: 5531
  source: /note="Description of Artificial Sequence: Synthetic primer"
  modified_base (66)..(71): a, c, t, g, unknown or other

SEQ ID NO: 5831 - DNA, 94 bp, Artificial Sequence; identical to SEQ ID NO: 5532
  source: /note="Description of Artificial Sequence: Synthetic primer"
  modified_base (66)..(71): a, c, t, g, unknown or other

SEQ ID NO: 5832 - DNA, 94 bp, Artificial Sequence; identical to SEQ ID NO: 5533
  source: /note="Description of Artificial Sequence: Synthetic primer"
  modified_base (66)..(71): a, c, t, g, unknown or other

SEQ ID NO: 5833 - DNA, 94 bp, Artificial Sequence; identical to SEQ ID NO: 5534
  source: /note="Description of Artificial Sequence: Synthetic primer"
  modified_base (66)..(71): a, c, t, g, unknown or other

SEQ ID NO: 5834 - DNA, 94 bp, Artificial Sequence; identical to SEQ ID NO: 5535
  source: /note="Description of Artificial Sequence: Synthetic primer"
  modified_base (66)..(71): a, c, t, g, unknown or other

SEQ ID NO: 5835 - DNA, 94 bp, Artificial Sequence; identical to SEQ ID NO: 5536
  source: /note="Description of Artificial Sequence: Synthetic primer"
  modified_base (66)..(71): a, c, t, g, unknown or other

SEQ ID NO: 5836 - DNA, 94 bp, Artificial Sequence; identical to SEQ ID NO: 5537
  source: /note="Description of Artificial Sequence: Synthetic primer"
  modified_base (66)..(71): a, c, t, g, unknown or other

SEQ ID NO: 5837 - DNA, 94 bp, Artificial Sequence; identical to SEQ ID NO: 5538
  source: /note="Description of Artificial Sequence: Synthetic primer"
  modified_base (66)..(71): a, c, t, g, unknown or other

SEQ ID NO: 5838 - DNA, 94 bp, Artificial Sequence; identical to SEQ ID NO: 5539
  source: /note="Description of Artificial Sequence: Synthetic primer"
  modified_base (66)..(71): a, c, t, g, unknown or other

SEQ ID NO: 5839 - DNA, 94 bp, Artificial Sequence; identical to SEQ ID NO: 5540
  source: /note="Description of Artificial Sequence: Synthetic primer"
  modified_base (66)..(71): a, c, t, g, unknown or other

SEQ ID NO: 5840 - DNA, 94 bp, Artificial Sequence; identical to SEQ ID NO: 5541
  source: /note="Description of Artificial Sequence: Synthetic primer"
  modified_base (66)..(71): a, c, t, g, unknown or other

SEQ ID NO: 5841 - DNA, 94 bp, Artificial Sequence; identical to SEQ ID NO: 5542
  source: /note="Description of Artificial Sequence: Synthetic primer"
  modified_base (66)..(71): a, c, t, g, unknown or other

SEQ ID NO: 5842 - DNA, 94 bp, Artificial Sequence; identical to SEQ ID NO: 5543
  source: /note="Description of Artificial Sequence: Synthetic primer"
  modified_base (66)..(71): a, c, t, g, unknown or other

SEQ ID NO: 5843 - DNA, 94 bp, Artificial Sequence; identical to SEQ ID NO: 5544
  source: /note="Description of Artificial Sequence: Synthetic primer"
  modified_base (66)..(71): a, c, t, g, unknown or other

SEQ ID NO: 5844 - DNA, 94 bp, Artificial Sequence; identical to SEQ ID NO: 5545
  source: /note="Description of Artificial Sequence: Synthetic primer"
  modified_base (66)..(71): a, c, t, g, unknown or other

SEQ ID NO: 5845 - DNA, 94 bp, Artificial Sequence; identical to SEQ ID NO: 5546
  source: /note="Description of Artificial Sequence: Synthetic primer"
  modified_base (66)..(71): a, c, t, g, unknown or other

SEQ ID NO: 5846 - DNA, 94 bp, Artificial Sequence; identical to SEQ ID NO: 5547
  source: /note="Description of Artificial Sequence: Synthetic primer"
  modified_base (66)..(71): a, c, t, g, unknown or other

SEQ ID NO: 5847 - DNA, 94 bp, Artificial Sequence; identical to SEQ ID NO: 5548
  source: /note="Description of Artificial Sequence: Synthetic primer"
  modified_base (66)..(71): a, c, t, g, unknown or other

SEQ ID NO: 5848 - DNA, 94 bp, Artificial Sequence; identical to SEQ ID NO: 5549
  source: /note="Description of Artificial Sequence: Synthetic primer"
  modified_base (66)..(71): a, c, t, g, unknown or other

SEQ ID NO: 5849 - DNA, 94 bp, Artificial Sequence; identical to SEQ ID NO: 5550
  source: /note="Description of Artificial Sequence: Synthetic primer"
  modified_base (66)..(71): a, c, t, g, unknown or other

SEQ ID NO: 5850 - DNA, 94 bp, Artificial Sequence; identical to SEQ ID NO: 5551
  source: /note="Description of Artificial Sequence: Synthetic primer"
  modified_base (66)..(71): a, c, t, g, unknown or other

SEQ ID NO: 5851 - DNA, 94 bp, Artificial Sequence; identical to SEQ ID NO: 5552
  source: /note="Description of Artificial Sequence: Synthetic primer"
  modified_base (66)..(71): a, c, t, g, unknown or other

SEQ ID NO: 5852 - DNA, 94 bp, Artificial Sequence; identical to SEQ ID NO: 5553
  source: /note="Description of Artificial Sequence: Synthetic primer"
  modified_base (66)..(71): a, c, t, g, unknown or other

SEQ ID NO: 5853 - DNA, 94 bp, Artificial Sequence; identical to SEQ ID NO: 5554
  source: /note="Description of Artificial Sequence: Synthetic primer"
  modified_base (66)..(71): a, c, t, g, unknown or other

SEQ ID NO: 5854 - DNA, 94 bp, Artificial Sequence; identical to SEQ ID NO: 5555
  source: /note="Description of Artificial Sequence: Synthetic primer"
  modified_base (66)..(71): a, c, t, g, unknown or other

SEQ ID NO: 5855 - DNA, 94 bp, Artificial Sequence; identical to SEQ ID NO: 5556
  source: /note="Description of Artificial Sequence: Synthetic primer"
  modified_base (66)..(71): a, c, t, g, unknown or other

SEQ ID NO: 5856 - DNA, 94 bp, Artificial Sequence; identical to SEQ ID NO: 5557
  source: /note="Description of Artificial Sequence: Synthetic primer"
  modified_base (66)..(71): a, c, t, g, unknown or other

SEQ ID NO: 5857 - DNA, 94 bp, Artificial Sequence; identical to SEQ ID NO: 5558
  source: /note="Description of Artificial Sequence: Synthetic primer"
  modified_base (66)..(71): a, c, t, g, unknown or other

SEQ ID NO: 5858 - DNA, 94 bp, Artificial Sequence; identical to SEQ ID NO: 5559
  source: /note="Description of Artificial Sequence: Synthetic primer"
  modified_base (66)..(71): a, c, t, g, unknown or other

SEQ ID NO: 5859 - DNA, 94 bp, Artificial Sequence; identical to SEQ ID NO: 5560
  source: /note="Description of Artificial Sequence: Synthetic primer"
  modified_base (66)..(71): a, c, t, g, unknown or other

SEQ ID NO: 5860 - DNA, 94 bp, Artificial Sequence; identical to SEQ ID NO: 5561
  source: /note="Description of Artificial Sequence: Synthetic primer"
  modified_base (66)..(71): a, c, t, g, unknown or other

SEQ ID NO: 5861 - DNA, 94 bp, Artificial Sequence; identical to SEQ ID NO: 5562
  source: /note="Description of Artificial Sequence: Synthetic primer"
  modified_base (66)..(71): a, c, t, g, unknown or other

SEQ ID NO: 5862 - DNA, 94 bp, Artificial Sequence; identical to SEQ ID NO: 5563
  source: /note="Description of Artificial Sequence: Synthetic primer"
  modified_base (66)..(71): a, c, t, g, unknown or other

SEQ ID NO: 5863 - DNA, 94 bp, Artificial Sequence; identical to SEQ ID NO: 5564
  source: /note="Description of Artificial Sequence: Synthetic primer"
  modified_base (66)..(71): a, c, t, g, unknown or other

SEQ ID NO: 5864 - DNA, 94 bp, Artificial Sequence; identical to SEQ ID NO: 5565
  source: /note="Description of Artificial Sequence: Synthetic primer"
  modified_base (66)..(71): a, c, t, g, unknown or other

SEQ ID NO: 5865 - DNA, 94 bp, Artificial Sequence; identical to SEQ ID NO: 5566
  source: /note="Description of Artificial Sequence: Synthetic primer"
  modified_base (66)..(71): a, c, t, g, unknown or other

SEQ ID NO: 5866 - DNA, 94 bp, Artificial Sequence; identical to SEQ ID NO: 5567
  source: /note="Description of Artificial Sequence: Synthetic primer"
  modified_base (66)..(71): a, c, t, g, unknown or other

SEQ ID NO: 5867 - DNA, 94 bp, Artificial Sequence; identical to SEQ ID NO: 5568
  source: /note="Description of Artificial Sequence: Synthetic primer"
  modified_base (66)..(71): a, c, t, g, unknown or other

SEQ ID NO: 5868 - DNA, 94 bp, Artificial Sequence; identical to SEQ ID NO: 5569
  source: /note="Description of Artificial Sequence: Synthetic primer"
  modified_base (66)..(71): a, c, t, g, unknown or other

SEQ ID NO: 5869 - DNA, 94 bp, Artificial Sequence; identical to SEQ ID NO: 5570
  source: /note="Description of Artificial Sequence: Synthetic primer"
  modified_base (66)..(71): a, c, t, g, unknown or other

SEQ ID NO: 5870 - DNA, 94 bp, Artificial Sequence; identical to SEQ ID NO: 5571
  source: /note="Description of Artificial Sequence: Synthetic primer"
  modified_base (66)..(71): a, c, t, g, unknown or other

SEQ ID NO: 5871 - DNA, 94 bp, Artificial Sequence; identical to SEQ ID NO: 5572
  source: /note="Description of Artificial Sequence: Synthetic primer"
  modified_base (66)..(71): a, c, t, g, unknown or other

SEQ ID NO: 5872 - DNA, 94 bp, Artificial Sequence; identical to SEQ ID NO: 5573
  source: /note="Description of Artificial Sequence: Synthetic primer"
  modified_base (66)..(71): a, c, t, g, unknown or other

SEQ ID NO: 5873 - DNA, 94 bp, Artificial Sequence; identical to SEQ ID NO: 5574
  source: /note="Description of Artificial Sequence: Synthetic primer"
  modified_base (66)..(71): a, c, t, g, unknown or other

SEQ ID NO: 5874 - DNA, 94 bp, Artificial Sequence; identical to SEQ ID NO: 5575
  source: /note="Description of Artificial Sequence: Synthetic primer"
  modified_base (66)..(71): a, c, t, g, unknown or other

SEQ ID NO: 5875 - DNA, 94 bp, Artificial Sequence; identical to SEQ ID NO: 5576
  source: /note="Description of Artificial Sequence: Synthetic primer"
  modified_base (66)..(71): a, c, t, g, unknown or other

SEQ ID NO: 5876 - DNA, 94 bp, Artificial Sequence; identical to SEQ ID NO: 5577
  source: /note="Description of Artificial Sequence: Synthetic primer"
  modified_base (66)..(71): a, c, t, g, unknown or other

SEQ ID NO: 5877 - DNA, 94 bp, Artificial Sequence; identical to SEQ ID NO: 5578
  source: /note="Description of Artificial Sequence: Synthetic primer"
  modified_base (66)..(71): a, c, t, g, unknown or other

SEQ ID NO: 5878 - DNA, 57 bp, Artificial Sequence
  source: /note="Description of Artificial Sequence: Synthetic primer"
  source: /note="5' Biotin"
  modified_base (56)..(57): a, c, t, g, unknown or other
aagcagtggtatcaacgcagagtacttttttttttttttttttttttttttttttnn

SEQ ID NO: 5879 - DNA, 25 bp, Artificial Sequence
  source: /note="Description of Artificial Sequence: Synthetic primer"
aagcagtggtatcaacgcagagtac

SEQ ID NO: 5880 - DNA, 30 bp, Artificial Sequence
  source: /note="Description of Artificial Sequence: Synthetic primer"
tttttttttttttttttttttttttttttt

SEQ ID NO: 5881 - DNA, 36 bp, Artificial Sequence
  source: /note="Description of Artificial Sequence: Synthetic primer"
  source: /note="Description of Combined DNA/RNA Molecule: Synthetic primer"
  modified_base (26)..(33): a, c, t, g, unknown or other
  modified_base (34)..(36): Riboguanine
  source: /note="3' phosphate blocking moiety"
aagcagtggtatcaacgcagagtacnnnnnnnnggg
